(19) United States
(12) Patent Application Publication
(10) Pub. No.: US 2024/0252617 A1
(43) Pub. Date: Aug. 1, 2024

(54) CORONAVIRUS SPIKE PROTEIN DESIGNS, COMPOSITIONS AND METHODS FOR THEIR USE

(71) Applicant: Duke University, Durham, NC (US)

(72) Inventors: Kevin Saunders, Durham, NC (US); Barton F. Haynes, Durham, NC (US)

(21) Appl. No.: 18/276,798

(22) PCT Filed: Feb. 10, 2022
(86) PCT No.: PCT/US2022/015969

§ 371 Date: Aug. 10, 2023

Related U.S. Application Data
(60) Provisional application No. 63/147,948, filed on Feb. 10, 2021.
(60) Provisional application No. 63/149,541, filed on Feb. 15, 2021.
(60) Provisional application No. 63/167,390, filed on Mar. 29, 2021.
(60) Provisional application No. 63/289,312, filed on Dec. 14, 2021.
(60) Provisional application No. 63/303,277, filed on Jan. 26, 2022.

(51) Int. Cl. A61K 39/215; A61K 39/00; A61P 31/14; C07K 14/005; C07K 14/435

(52) U.S. Cl. CPC A61K 39/215; A61P 31/14; C07K 14/005; C07K 14/435; A61K 2039/53; A61K 2039/55555; A61K 2039/575; A61K 2039/70; C07K 2319/50; C12N 2770/20022; C12N 2770/20034

(57) ABSTRACT

The invention is directed to coronavirus based immunogens, including immunogens comprising spike protein and or domains thereof, comprised in multimeric complexes. Provided are also methods of using these immunogens to induce immunogenic responses in a subject.

[0001] This application is a National Stage Entry of PCT Application No. PCT/US2022/015969, filed on Feb. 10, 2022, which claims the benefit of and priority to U.S. Application Ser. No. 63/303,277, filed Jan. 26, 2022; U.S. Application Ser. No. 63/289,312, filed Dec. 14, 2021; U.S. Application Ser. No. 63/167,390, filed Mar. 29, 2021; U.S. Application Ser. No. 63/149,541, filed Feb. 15, 2021; and U.S. Application Ser. No. 63/147,948, filed Feb. 10, 2021, the content of each application is herein incorporated by reference in its entirety.

[0002] All patents, patent applications and publications cited herein are hereby incorporated by reference in their entirety. The disclosures of these publications in their entireties are hereby incorporated by reference into this application in order to more fully describe the state of the art as known to those skilled therein as of the date of the invention described and claimed herein.

### GOVERNMENT INTERESTS

[0003] This invention was made with government support under the Integrated Preclinical and Clinical AIDS Vaccine Development Grant AI 142596 from NIH, NIAID, DAIDS and a grant from the State of North Carolina from the Federal CARES Act. The government has certain rights in the invention.

[0004] This patent disclosure contains material that is subject to copyright protection. The copyright owner has no objection to the facsimile reproduction by anyone of the patent document or the patent disclosure as it appears in the U.S. Patent and Trademark Office patent file or records, but otherwise reserves any and all copyright rights.

### SEQUENCE LISTING

[0005] The instant application contains a Sequence Listing which has been submitted electronically in ASCII format and is hereby incorporated by reference in its entirety. Said ASCII copy, created on Mar. 18, 2022, is named 2933311-000045-WO1_SL.txt and is 921,603 bytes in size.

### TECHNICAL FIELD

[0006] The invention encompasses, in general, modified coronavirus protein SARS-CoV-2 proteins, nucleic acids encoding these, methods of making recombinant proteins and nucleic acids, compositions comprising these and their use in vaccination regimens, and diagnostic assays.

### BACKGROUND

[0007] The ongoing global pandemic of the new SARS-CoV-2 coronavirus (CoV) presents an urgent need for the development of effective preventative and treatment therapies.

[0008] Development of an effective vaccine for prevention of coronavirus (SARS-2) infection is a global priority.

### SUMMARY

[0009] In certain aspects the invention provides modified coronavirus spike proteins designs including without limitation designs based on SARS-CoV-2 (SARS-2), SARS-CoV-1 (CoV1), MERS, or any other coronavirus spike protein. In certain aspects these protein designs comprise a spike protein, various spike portions and/or domains. In certain embodiments, these proteins are designed to form a multimeric complex. In non-limiting embodiments, the domain is a spike receptor binding domain (RBD). In non-limiting embodiments, the domain is a spike N-terminal domain (NTD). In non-limiting embodiments, the domain is a spike fusion peptide (FP). In non-limiting embodiments, the domain is S2. In non-limiting embodiments, the multimeric complexes comprise a ferritin sequence. In non-limiting embodiments, the multimeric complexes comprising a ferritin sequence are designed and are assembled as ferritin fusion proteins. In non-limiting embodiments, the multimeric complexes comprising a ferritin sequence are designed and are assembled via sortase reaction. In non-limiting embodiments, the multimeric complexes comprise encapsulin. These multimeric complexes are nanoparticles.

[0010] In certain aspects the invention provides a recombinant fusion protein sequence comprising in order a full-length coronavirus spike protein or a portion thereof, a peptide linker and a self-assembling protein, wherein the fusion protein is comprised in a multimeric protein complex, wherein non-limiting embodiments of sequences are shown in FIG. 18, FIG. 20, FIG. 21, FIG. 22, FIG. 23, and FIG. 45 and Table 1, Table 2, Table 3 and Table 5. In certain aspects the invention provides a recombinant fusion protein comprising a full-length coronavirus spike protein or a portion thereof connected via a linker to a self-assembling protein, wherein the fusion protein is comprised in a multimeric protein complex, wherein non-limiting embodiments of sequences are shown in FIG. 18, FIG. 20, FIG. 21, FIG. 22, FIG. 23, and FIG. 45 and Table 1, Table 2, Table 3 and Table 5.

[0011] In certain embodiments, the coronavirus spike proteins or portions thereof is RBD—amino acids 319-541; RBDcore—amino acids 333-524 see FIG. 21B, RBDcoreExt—amino acids 333-527 or RBDcoreExtKK—amino acids 333-529 see FIG. 22. In certain embodiments, the coronavirus spike proteins or portions thereof is N-terminal domain (NTD)—amino acids 27-292, wherein amino acid positions are with respect to CoV2 sequence. In certain embodiments, the linker is described in Table 4. In certain embodiments, the linker is LPXTGGGGGGSG (SEQ ID NO: 1) or GSGLPXTGGGGG (SEQ ID NO: 2), wherein in some embodiments X is E. In certain embodiments, the linker is GGS(n) (SEQ ID NO: 3), wherein n=1, 2, or 3. In certain embodiments, the linker is GGS(n)EKAAKAEEAAR(PP) (SEQ ID NO: 4) the linker is EKAAKAEEAAR(PP)GGS(n) wherein n=1, 2, or 3 (SEQ ID NO: 5).

[0012] In certain embodiments, the recombinant fusion protein comprises, consists essentially of or consists of amino acid sequences shown in FIG. 18C-1 through FIG. 18C-15, FIG. 23B.

[0013] In certain embodiments, the self-assembling protein is ferritin and the multimeric protein complex is referred to as ferritin nanoparticle.

[0014] In certain aspects the invention provides a nucleic acid encoding the coronavirus spike protein or fragment thereof in the recombinant fusion protein of the invention.

[0015] In certain aspects the invention provides a multimeric protein complex comprising a recombinant fusion protein sequence comprising in order a full-length coronavirus spike protein or a portion thereof, a peptide linker and a self-assembling protein that forms the multimeric protein complex.

[0016] In certain embodiments of the multimeric protein complex the coronavirus spike proteins or portions thereof is RBD—amino acids 319-541; RBDcore—amino acids 333-524 see FIG. 21B, RBDcoreExt—amino acids 333-527 or RBDcoreExtKK—amino acids 333-529 see FIG. 22. In certain embodiments, the coronavirus spike proteins or portions thereof is N-terminal domain (NTD)—amino acids 27-292, wherein amino acid positions are with respect to CoV2 sequence. In certain embodiments of the multimeric protein complex the linker is described in Table 4. In certain embodiments of the multimeric protein complex the linker is LPXTGGGGGGSG (SEQ ID NO: 1) or GSGLPXTGGGGG (SEQ ID NO: 2), wherein in some embodiments X is E. In certain embodiments of the multimeric protein complex the linker is or comprises [GGS](n) (SEQ ID NO: 6), wherein n=1, 2, 3 or 4. In certain embodiments of the multimeric protein complex the linker is [GGS](n)EKAAKAEEAAR(PP) (SEQ ID NO: 7) the linker is EKAAKAEEAAR(PP)[GGS](n) (SEQ ID NO: 8) wherein n=1, 2, 3 or 4. In certain embodiments of the multimeric protein complex comprises, consists essentially of or consists of amino acid sequences shown in FIG. 18C-1 through FIG. 18C-15, FIG. 23B. In certain embodiments of the multimeric protein complex the self-assembling protein is ferritin and the multimeric protein complex is ferritin nanoparticle.

[0017] In certain embodiments of the multimeric protein complex, the multimeric protein complex is multispecific comprising two, three, four or more different recombinant fusion protein sequences comprising in order a full-length coronavirus spike protein or a portion thereof, wherein the two, three, four or more full-length coronavirus spike protein or a portion thereof have different sequences, a peptide linker and a self-assembling protein.

[0018] In certain embodiments of the multimeric protein complex, the multimeric protein complex is multispecific comprising two or three different recombinant fusion protein sequence comprising in order a full-length coronavirus spike protein or a portion thereof, a peptide linker and a self-assembling protein, wherein the recombinant fusion protein sequences represent different coronaviruses from subgroups 2a, 2b, 2c, 2d or combinations thereof.

[0019] In certain embodiments of the multimeric protein complex, the multimeric protein complex is multispecific comprising a combination of two or three different recombinant fusion protein sequence each one comprising in order a full-length coronavirus spike protein or a portion thereof, a peptide linker and a self-assembling protein. In some embodiments, wherein the recombinant fusion protein sequences comprise alpha, beta, gamma, delta coronavirus sequences or combination thereof.

[0020] In certain embodiments, the multimeric protein complex comprises one or more recombinant fusion protein sequence group 2b and one or more recombinant fusion protein sequence group 2c betacoronavirus sequence.

[0021] In some embodiments of coronavirus combinations, the recombinant fusion protein sequences comprise one SARS-related BatCoV, e.g without limitation SHCO14 or WIV-1, one group 2C MERs-related CoV, e.g. without limitation MERS-CoV or HKU4, and/or one human SARS-related CoV, e.g. without limitation SARS-CoV1 or SARS-CoV-2 sequence or a variant thereof. In some embodiments, these combinations include only two of the three viruses. Non-limiting embodiments of combination of viruses are: MERS-CoV, SARS-CoV-2, SHC014, or any combination thereof; MERS-CoV, SARS-CoV-1, SHC014 or any combination thereof; MERS-CoV, SARS-CoV-2, WIV-1 or any combination thereof; MERS-CoV, SARS-CoV-1, WIV-1 or any combination thereof; HKU4, SARS-CoV-2, SHC014 or any combination thereof; HKU4, SARS-CoV-1, SHC014 or any combination thereof; HKU4, SARS-CoV-2, WIV-1 or any combination thereof; HKU4, SARS-CoV-1, WIV-1 or any combination thereof. In some embodiment, the combination includes sequences from SARS-CoV1 and MERS-CoV1 coronaviruses. In some embodiments, the combination includes viruses for example as represented in FIG. 18, 20, 21 22, 23, 45 and FIG. 18C-1 through FIG. 18C-15. In some embodiments, HuPn and PDCoV-Haiti RBD are combined with a SARS-related betacoronavirus and/or MERS-related CoV to protect humans from severe infection by any of these or similar viruses. In certain embodiments of the multimeric protein complex, the self-assembling protein is ferritin, and wherein the multimeric protein complex is a ferritin nanoparticle.

[0022] In certain aspects the invention provides a composition comprising a recombinantly produced fusion protein or a portion thereof and a pharmaceutically acceptable carrier.

[0023] In some aspects the invention provides a composition comprising a plurality of multimeric protein complexes comprising a recombinant fusion protein sequence comprising in order a full-length coronavirus spike protein or a portion thereof, a peptide linker and a self-assembling protein that forms the multimeric protein complex. In certain embodiments, the plurality of multimeric protein complexes comprises complexes each having identical recombinant fusion protein sequence comprising in order a full-length coronavirus spike protein or a portion thereof, a peptide linker and a self-assembling protein. In certain embodiments, the plurality of multimeric protein complexes comprises a combination of two, three, or four or more types of multimeric complexes each having different recombinant fusion protein sequence comprising in order a full-length coronavirus spike protein or a portion thereof, a peptide linker and a self-assembling protein. Coronavirus combinations are described throughout.

[0024] In certain aspects, the invention provides a composition comprising a nucleic acid encoding a recombinant fusion protein of the invention or a combination thereof and a pharmaceutically acceptable carrier. In certain embodiments, the nucleic acid is an mRNA. In certain embodiments, the mRNA is modified mRNA and the composition further comprises LNPs. Coronavirus combinations are described throughout. In some embodiments, the combination includes sequences from SARS-CoV1 and MERS-CoV1 coronaviruses. In some embodiments, the combination includes viruses for example as represented in FIG. 18, 20, 21 22, 23, 45 and FIG. 18C-1 through FIG. 18C-15.

[0025] In certain aspects the invention provides a virus-like particle comprising any one of the recombinant fusion protein of the invention.

[0026] In certain aspects the invention provides a host cell comprising a nucleic acid molecule encoding a recombinant fusion protein of the invention.

[0027] In certain aspects the invention provides a method of producing a multimeric protein complex of the invention the method comprising: expressing a nucleic acid molecule or vector encoding a recombinant fusion protein in a host cell under conditions suitable to produce the recombinant fusion protein; purifying the recombinant fusion protein from the host cell by any suitable purification methods; contacting/reacting the recombinant fusion protein with a self-assembling ferritin protein in the presence of a sortase enzyme in a conjugation reaction, under suitable conjugation conditions to form by sortase conjugation a multimeric ferritin protein complex which comprises the recombinant fusion protein; and isolating the multimeric ferritin protein complex conjugated to the recombinant fusion protein from the rest of the conjugation reaction, which includes unreacted recombinant fusion protein, self-assembling ferritin protein, multimeric ferritin protein complex unconjugated to the recombinant fusion protein and the sortase enzyme. In some embodiments, the self-assembling ferritin protein is formed in a multimeric protein complex prior to contacting with the recombinant fusion protein.

[0028] In certain aspects, the invention provides an immunogenic composition comprising any of the recombinant fusion proteins, nucleic acids encoding these recombinant fusion proteins, multimeric protein complex or VLP comprising recombinant fusion proteins of the invention and a pharmaceutically acceptable carrier and an adjuvant.

[0029] In certain aspects the invention provides a method of inducing an immune response to a coronavirus in a subject in need thereof, comprising administering to the subject in an effective amount of any of the recombinant fusion proteins of the invention, nucleic acids encoding these recombinant fusion proteins, multimeric protein complexes or VLPs comprising recombinant fusion proteins of the invention and/or the immunogenic composition of the invention in an amount sufficient to induce an immune response. In non-limiting embodiments the immune response includes a response to more than one sarbecovirus. The methods of inducing an immune response comprising administering compositions as prime, boost, or multiple boosts. In some embodiments, the compositions of the invention are administered as a boost after immunization with SARS-CoV2 vaccine. The optimal immunization scheme can be readily determined by the skilled artisan.

[0030] In certain aspects, the invention provides modified coronavirus spike proteins designs including without limitation designs based on SARS-CoV-2 (SARS-2), SARS-CoV-1 (CoV1), MERS, or any other corona virus spike protein. In certain embodiments, the protein design provides a stabilized protein conformation(s) of the SARS-2 trimer. In certain embodiments, the inventive designs are recombinant proteins. In certain embodiments, the inventive designs are nucleic acids. Nucleic acids include without limitation modified mRNAs.

[0031] In certain embodiments, a multimeric complex of the invention comprises coronavirus spike proteins or portions thereof, e.g. but not limited to RBD, NTD, FP, S2 or any other portion, from the same human or animal coronaviruses. In certain embodiments, a multimeric complex of the invention comprises coronavirus spike proteins or portions thereof, e.g. but not limited to RBD, NTD, FP, S2 or any other portion, from different human or animal coronaviruses and with different sequences. A multimeric complex comprising coronavirus spike proteins or portions thereof, e.g. but not limited to RBD, NTD, FP, S2 or any other portion, from different human or animal coronaviruses and with different sequences is a multispecific complex.

[0032] In certain aspects, the invention also provides compositions comprising a combination of different multimeric complexes comprising different coronavirus spike proteins or portions, wherein each multimeric complex comprises coronavirus spike proteins or portions thereof, e.g. but not limited to RBD, NTD, FP, S2 or any other portion, from the same human or animal coronaviruses. In certain aspects, the invention provides compositions comprising a combination of different multimeric complexes comprising different coronavirus spike proteins or portions, wherein each a multimeric complex of the invention comprises coronavirus spike proteins or portions thereof, e.g. but not limited to RBD, NTD, FP, S2 or any other portion, from different human or animal coronaviruses and with different sequences.

[0033] Table 1, Table 3 and Table 3 list non-limiting examples of immunogens designs from different human or animal coronaviruses with different sequences. These sequence designs are non-limiting examples of spike proteins or portions thereof that can be used in multispecific multimeric complexes and/or in multimeric complexes in multispecific compositions. In certain embodiments, the sequences are variants of the same coronavirus, e.g. CoV2. In certain embodiments, the sequences are from different betacoronavirus groups, e.g. 2a, 2b, 2c, 2d. In certain embodiments, the sequences are from CoV1 and CoV2. In certain embodiments, the sequences are from CoV1 and MERS, or MERS related CoV. In certain embodiments, sequences can be from alpha, beta, gamma or delta coronaviruses, or any combinations thereof. In certain embodiments, the multimeric complex comprises spike protein sequence from MERS, Pangolin and bat, e.g. but not limited to RBDs, NTDs, FPs, S2 domains, or any other portion or combinations linked to ferritin. In certain embodiments, the multimeric complex comprises spike protein sequences or portions thereof from any circulating coronavirus strain, e.g. but not limited to California, UK and RSA Cov2 variants linked to ferritin. Multimeric complexes comprising different coronavirus spike proteins or portions thereof could be combined. Certain non-limiting embodiments of multimeric complexes comprise spike protein, various spike portions and/or domains, or combinations thereof from designs listed in Table 1, Table 2 and Table 3. In non-limiting embodiments, to include coverage of group 2B and 2C betacoronaviruses, multimeric complexes comprise one SARS-related BatCoV, e.g without limitation SHC014 or WIV-1, one group 2C MERs-related CoV, e.g. without limitation MERS-CoV or HKU4, and/or one human SARS-related CoV, e.g. without limitation SARS-CoV1 or SARS-CoV-2 sequence or a variant thereof. These combinations can also be paired down to include only two of the three viruses. Non-limiting embodiments of combination of viruses are: MERS-CoV, SARS-CoV-2, SHC014, or any combination thereof; MERS-CoV, SARS-CoV-1, SHC014 or any combination thereof; MERS-CoV, SARS-CoV-2, WIV-1 or any combination thereof; MERS-CoV, SARS-CoV-1, WIV-1 or any combination thereof; HKU4, SARS-CoV-2, SHC014 or any combination thereof; HKU4, SARS-CoV-1, SHC014 or any combination thereof; HKU4, SARS-CoV-2, WIV-1 or any combination thereof; HKU4, SARS-CoV-1, WIV-1 or any combination thereof. Non-limiting embodiments of a pan coronavirus vaccine we will include RBDs or any other spike portion from novel alphacoronaviruses and deltacoronaviruses that can infect humans. In some embodiments, HuPn and PDCoV-Haiti RBD will be combined with a SARS-related betacoronavirus and/or MERS-related CoV to protect humans from severe infection by any of these or similar viruses.

[0034] In certain aspects, the invention provides a recombinant fusion protein comprising a full-length coronavirus spike protein or a portion/domain thereof connected via a linker to a self-assembling protein/a multimerization domain, wherein the fusion protein forms a multimeric complex. In certain aspects, the invention provides a recombinant fusion protein comprising a full-length coronavirus spike protein or a portion/domain thereof connected via a linker to a self-assembling protein/a multimerization domain, wherein the fusion protein is comprised in a multimeric complex.

[0035] In non-limiting embodiments the portion of the coronavirus spike protein is RBD. In non-limiting embodiments the portion of the coronavirus spike protein is fusion peptide (FP). In certain embodiments, the portion of the coronavirus spike protein is N-terminal domain (NTD). Non-limiting embodiments of sequences are shown in FIG. 18, FIG. 20, FIG. 21, FIG. 22, and FIG. 23 and Table 1, Table 2 and Table 3. In non-limiting embodiments, the recombinant fusion protein is immunogenic.

[0036] In non-limiting embodiments the self-assembling protein is ferritin, encapsulin or any other suitable self-assembling protein allowing multimerization.

[0037] In certain aspects, the invention provides a composition comprising a recombinantly-produced modified coronavirus spike proteins of the invention or a portion thereof. In certain embodiments, the compositions comprise a plurality of different multimeric complexes each complex comprising a single sequence/specificity recombinantly-produced modified coronavirus spike proteins of the invention or a portion thereof and wherein the composition as whole is multispecific. In certain embodiments, at least one or a few of the plurality of the multimeric complexes comprises a multispecific multimeric complex(es) where each complex comprises two, three, four or more recombinantly-produced modified coronavirus spike proteins of the invention or a portion thereof of different sequences/specificity and wherein each multimeric complex is multispecific. In certain embodiments, the recombinant proteins or fragments are comprised in multimeric complexes. In certain embodiments, the multimeric complex comprises coronavirus spike proteins or portions thereof, e.g. but not limited to RBD, NTD, FP, S2 or any other portion, from different human or animal coronaviruses and with different sequences. Non-limiting examples of different human or animal coronaviruses and with different sequences are listed in Table 1, Table 2 or Table 3. In certain embodiments the sequences are variants of the same coronavirus, e.g. CoV2. In certain embodiments, the sequences are from different betacoronavirus groups, e.g. 2a, 2b, 2c, 2d. In certain embodiments, the sequences are from CoV1 and CoV2. In certain embodiments, the sequences are from CoV1 and MERS. Sequences can be from alpha, beta, gamma or delta coronaviruses. In certain embodiments, the multimeric complex comprises spike protein sequence from SARS1, MERS, Pangolin and/or bat. In certain embodiments, the multimeric complex comprises spike protein sequences from any circulating coronavirus strain, e.g. but not limited to California, UK, delta, omicron and RSA Cov2 variants linked to ferritin. Multimeric complexes comprising different coronavirus spike proteins or portions thereof could be combined.

[0038] Compositions with nucleic acid for multispecific NPs.

[0039] In non-limiting embodiments, to include coverage of group 2B and 2C betacoronaviruses, combinations in multimeric multispecific complexes or multispecific composition comprise multimeric complexes including one SARS-related BatCoV, e.g without limitation SHCO14 or WIV-1, one group 2C MERs-related CoV, e.g. without limitation MERS-CoV or HKU4, and/or one human SARS-related CoV, e.g. without limitation SARS-CoV1 or SARS-CoV-2 sequence or a variant thereof. These combinations can also be paired down to include only two of the three viruses. Non-limiting embodiments of combination of viruses are: MERS-CoV, SARS-CoV-2, SHC014, or any combination thereof; MERS-CoV, SARS-CoV-1, SHCO14 or any combination thereof; MERS-CoV, SARS-CoV-2, WIV-1 or any combination thereof; MERS-CoV, SARS-CoV-1, WIV-1 or any combination thereof; HKU4, SARS-CoV-2, SHCO14 or any combination thereof; HKU4, SARS-CoV-1, SHCO14 or any combination thereof; HKU4, SARS-CoV-2, WIV-1 or any combination thereof; HKU4, SARS-CoV-1, WIV-1 or any combination thereof. These combinations can also be paired down to include only two of the three viruses. Non-limiting embodiments of a pan coronavirus vaccine we will include RBDs or any other spike portion from novel alphacoronaviruses and deltacoronaviruses that can infect humans. In some embodiments, HuPn and PDCoV-Haiti RBD will be combined with a SARS-related betacoronavirus and/or MERS-related CoV to protect humans from severe infection by any of these or similar viruses.

[0040] In certain embodiments the coronavirus spike proteins or portions thereof is RBD—amino acids 319-541; RBDcore—amino acids 333-524 see FIG. 21B, RBDcoreExt—amino acids 333-527 or RBDcoreExtKK—amino acids 333-529 see FIG. 22. In certain embodiments, the coronavirus spike proteins or portions thereof is N-terminal domain (NTD)—amino acids 27-292). Amino acid positions with respect to CoV2 sequence XX.

[0041] In non-limiting embodiments the linker is listed in Table 4. In non-limiting embodiments the linker is LPXTGGGGGGSG (SEQ ID NO: 1) or GSGLPXTGGGGG (SEQ ID NO: 2) comprising linker. In some embodiments X is E. In non-limiting embodiments the linker is GSG(n) where n=1, 2, or 3 (SEQ ID NO: 29). In non-limiting embodiments the linker is EKAAKAEEAAR (SEQ ID NO: 9), EKAAKAEEAARP (SEQ ID NO: 10), EKAAKAEEAARPP (SEQ ID NO: 11), GGSEKAAKAEEAAR (SEQ ID NO: 12), GGSEKAAKAEEAARP (SEQ ID NO: 13), or GGSEKAAKAEEAARPP (SEQ ID NO: 14).

[0042] In certain embodiments, the invention provides a recombinant fusion protein comprising all the consecutive amino acids after the signal peptide of the polypeptide sequences described herein. For specific non-limiting embodiments of sequences see FIG. 18, FIG. 20, FIG. 21, FIG. 22, and FIG. 23 and Table 1, Table 2 and Table 3. In one embodiment the recombinant fusion protein is shown in FIG. 18C-1 (SEQ ID NO: 97).

[0043] In certain aspects the invention provides a nucleic acid encoding the coronavirus spike protein or fragment thereof, and in some embodiment any suitable tag or linker, in the recombinant fusion protein of the invention. In certain aspects the invention provides a nucleic acid encoding the recombinant fusion protein of the invention.

[0044] In certain aspects the invention provides a composition comprising a recombinantly produced fusion protein or a portion thereof of and a carrier. In certain embodiments, the compositions are immunogenic. In certain embodiments the compositions comprise an adjuvant. Any suitable adjuvant could be used. In certain embodiments the compositions comprise a plurality of recombinantly produced fusion protein or portion thereof. In certain embodiments each recombinantly produced fusion protein or portion thereof is of the same sequence. In certain embodiments recombinantly produced fusion proteins or portions thereof comprised in a composition have different sequence, e.g. without limitation sequences are from different types, e.g. 2a, 2b, 2c, or 2d, sequences of variants or mutations from the same strain, e.g. different sequences from CoV1 and/or CoV2.

[0045] In certain aspects the invention provides composition comprising a nucleic acid encoding a recombinant fusion protein of the invention and a carrier.

[0046] In certain aspects the invention provides protein nanoparticle, comprising any one of the recombinant fusion protein of the invention. In certain embodiments, the protein nanoparticle subunit is a ferritin nanoparticle subunit. A composition comprising a plurality of nanoparticles, comprising a multimerized recombinant coronavirus protein of the invention or a portion thereof and a carrier.

[0047] In certain aspects the invention provides A virus-like particle comprising any one of the recombinant fusion protein of the invention.

[0048] In certain aspects the invention provides a host cell comprising a nucleic acid molecule encoding a recombinant fusion protein of the invention.

[0049] In certain aspects the invention provides a method of producing a recombinant fusion protein of the invention, comprising: expressing the nucleic acid molecule or vector comprising a nucleic acid encoding in a host cell to produce the recombinant protein antigen; purifying the recombinant protein antigen; contacting/reacting the recombinant protein antigen with a ferritin protein, wherein in some embodiments the ferritin protein is multimerized in a ferritin multimeric complex, in the presence of a sortase enzyme, under conditions suitable to form a multimeric complex linked to the recombinant protein antigen; and isolating the antigen(s) comprising multimeric complex from unreacted recombinant protein antigen, ferritin and sortase enzyme.

[0050] An immunogenic composition comprising any one of the recombinant fusion protein, nucleic acids encoding these recombinant fusion proteins, nanoparticle or VLP of the invention and a pharmaceutically acceptable carrier. In some embodiments, the immunogenic composition further comprises an adjuvant.

[0051] A method for inducing an immune response to a coronavirus in a subject, comprising administering to the subject an effective amount of any one of the recombinant fusion proteins of the invention and/or an immunogenic composition of the invention in an amount sufficient to induce an immune response.

[0052] In certain embodiments, the method comprising administering a combination of immunogens targeting coronavirus from group 2a, 2b, 2c or 2d.

[0053] The recombinant protein of the invention, wherein the recombinant protein is produced by conjugating a spike protein or portion thereof to a multimerizing protein in a sortase mediated conjugation reaction.

[0054] In certain aspects, the invention provides modified coronavirus spike proteins, for example but not limited in a stabilized conformation, nucleic acid molecules and vectors encoding these proteins, and methods of their use and production are disclosed. In several embodiments, the coronavirus modified coronavirus spike proteins and/or nucleic acid molecules can be used to generate an immune response to coronavirus in a subject. In additional embodiments, the therapeutically effective amount of the coronavirus modified coronavirus spike proteins and/or nucleic acid molecules can be administered to a subject in a method of treating or preventing coronavirus infection. In certain embodiments, the proteins of the invention could be used in diagnostic assays.

[0055] In certain aspects, the invention provides spike ectodomain trimers in a stabilized conformation, nucleic acid molecules and vectors encoding these proteins, and methods of their use and production are disclosed. In several embodiments, the coronavirus spike ectodomain trimers and/or nucleic acid molecules can be used to generate an immune response to coronavirus in a subject. In additional embodiments, the therapeutically effective amount of the coronavirus S ectodomain trimers and/or nucleic acid molecules can be administered to a subject in a method of treating or preventing coronavirus infection. In certain embodiments, the proteins of the invention could be used in diagnostic assays.

[0056] In certain embodiments, the modified SARS-2 spike proteins do not include modification as described in US Patent Publication 20200061185.

[0057] The invention provides amino acid or nucleic acids sequences encoding such spike protein designs. Provided are also nucleic acids, including modified mRNAs which are stable and could be used as immunogens. Non-limiting embodiments include recombinant proteins, trimers, multimerized proteins, e.g. but not limited to nanoparticles. Provided also are nucleic acids optionally designed as vectors, for example for recombinant expression and/or stable integration, e.g. but not limited, DNA encoding trimer for stable expression, or virus-like particle (VLP) incorporation. In non-limiting embodiments, nucleic acids are mRNA, including but not limited to modified mRNA which are used immunogens. Modified mRNAs could be formulated in any suitable formulation, including but not limited to lipid nanoparticles (LNPs).

[0058] In some embodiments a protein design is based on SARS-2 spike protein and is characterized as having 99%, 98%, 97%, 96%, 95%, 94%, 93%, 92%, 91%, 90%, 89%, 88%, 87%, 86%, 85%, 84%, 83%, 82%, 81%, 80%, 79%, 78%, 77%, 76%, or 75% similarity or identity to the designs described herein.

[0059] In non-limiting embodiments the invention provides modified coronavirus spike proteins or portions thereof designed to form a multimeric complex, nucleic acid molecules and vectors encoding these proteins, and methods of their use and production are disclosed. In several embodiments, the multimeric complexes and/or nucleic acid molecules can be administered in therapeutic amounts to generate an immune response to coronavirus in a subject. In certain embodiments, the therapeutically effective amount can be administered to a subject in a method of treating or preventing coronavirus infection. In certain embodiments, the therapeutically effective amount can be administered to a subject in a method of inhibiting or reducing coronavirus replication in a subject.

[0060] In certain aspects, the invention provides a recombinant coronavirus protein comprising all the consecutive amino acids after the signal peptide of the amino acid sequences described herein. For specific non-limiting embodiments of sequences see FIG. 18, FIG. 20, FIG. 21, FIG. 22, FIG. 23, and FIG. 45. Provided are also methods of using these coronavirus proteins to reduce viral replication.

[0061] In certain aspects, the invention provides a nucleic acid encoding the modified coronavirus protein of the invention. In non-limiting embodiments, the nucleic acid is a modified mRNA. In certain embodiments, the mRNA is in a composition comprising LNPs.

[0062] In certain embodiments, the nucleic acid is comprised in a vector and is operably linked to a promoter.

[0063] Any one of the modifications described herein could be engineered in a full length coronavirus spike sequence or in a fragment, e.g. but not limited to the ectodomain, RBD, NTD, or FP.

[0064] In certain aspects, the invention provides a composition comprising a recombinantly-produced modified coronavirus spike proteins of the invention or fragments thereof. In certain embodiments, the compositions are multispecific and comprise multimeric complexes each with different specificity. In certain embodiments, the multimeric complexes are multispecific. In certain embodiments, the recombinant proteins or fragments are comprised in multimeric complexes. In certain embodiments, the multimeric complexes comprise ferritin. In certain embodiments, the compositions comprise a carrier.

[0065] In certain embodiments, the compositions are immunogenic. In certain embodiments the compositions comprise an adjuvant. Any suitable adjuvant could be used. In non-limited embodiments the adjuvant is TLR7/8 agonist. In certain embodiment the TLR7/8 agonist is a compound represented by Formula (I) or a pharmaceutically acceptable salt thereof. In non-limiting embodiments the adjuvant is 3M-052 or a pharmaceutically acceptable salt thereof. In some embodiments the adjuvant is formulated in alum. In some embodiments, the adjuvant is formulated as stable emulsion (SE). In non-limiting embodiments the adjuvant is 3M-052 formulated in alum. In non-limiting embodiments the adjuvant is 3M-052 formulated in SE. In non-limiting embodiments the adjuvant is alum.

[0066] In certain embodiments the invention provides a recombinant fusion protein comprising spike protein domain connected by a linker to a self-assembling protein which multimerizes wherein the fusion protein forms a multimeric complex. In certain embodiments the spike protein domain is RBD, NTD, FP or any other portion. In certain embodiments, the spike protein domain is RBD, wherein the RBD is from a beta coronavirus. In certain embodiments the self-assembling protein is ferritin.

[0067] In certain embodiments the invention provides a composition comprising a recombinant fusion protein of the invention and an adjuvant. In certain embodiments the invention provides a composition comprising a recombinant protein of FIG. 18C-1 (SEQ ID NO: 97) and an adjuvant. In certain embodiments the adjuvant is TLR7/8 agonist is a compound represented by Formula (I) or a pharmaceutically acceptable salt thereof. In certain embodiments the adjuvant is formulated as described herein. In certain aspects the invention provides compositions which comprise recombinant fusion proteins comprising spike protein domains with different sequences. In non-limited embodiments, the sequences are from different beta coronavirus groups.

[0068] In certain aspects the invention provides methods of using the recombinant fusions proteins of the invention and compositions comprising these to induce immune responses in a subject. Without being bound by a specific theory, administering recombinant fusion proteins of the invention in combination with a TLR7/8 agonist leads to unexpected results, e.g. but not limited to results described in Example 1A and Example 3.

[0069] In certain aspects the invention provides a composition comprising a nucleic acid encoding any of the modified coronavirus spike proteins and a carrier. Also disclosed herein are modified mRNA, for example comprising suitable modifications for expression as immunogens. Non-limiting examples include modified nucleosides, capping, polyA tail, and the like. In certain embodiments the compositions comprise an adjuvant.

[0070] In certain embodiments the designs produce a soluble protein. In certain embodiments the designs are comprised in a protomer which can form a trimer. In certain embodiments the designs comprise a TM domain.

[0071] In certain embodiments the compositions comprise a coronavirus spike ectodomain trimer comprising protomers comprising sequence modification as described herein.

[0072] In non-limiting embodiments, the designs comprise additional modifications to allow multimerization. In non-limiting embodiments, wherein the design comprises a soluble ectodomain, additional modifications could be included to allow multimerization. In a non-limiting embodiment, a C-terminal residue of the protomers in the ectodomain is linked to a trimerization domain by a peptide linker, or is directly linked to the trimerization domain. In some embodiments, the trimerization domain is a T4 fibritin trimerization domain. In one example, a T4 Fibritin trimerization domain comprises the amino acid sequence set forth as GYIPEAPRDGQAYVRKDGEWVLLSTF (SEQ ID NO: 15). In some embodiments, a protease cleavage site (such as a thrombin cleavage site) can be included between the C-terminus of the recombinant coronavirus ectodomain and the T4 Fibritin trimerization domain to facilitate removal of the trimerization domain as needed, for example, following expression and purification of the recombinant SARS-2 S ectodomain.

[0073] In certain embodiments, the modified coronavirus spike designs further comprise furin protease cleavage site and/or a cathepsin L cleavage site. In certain embodiments, the modified coronavirus spike protein trimer is soluble.

[0074] In certain embodiments, a C-terminal residue of the protomers in the ectodomain of the modified SARS-2 spike protein or the portion thereof is linked to a transmembrane domain by a peptide linker, or is directly linked to the transmembrane domain. In certain embodiments, the modified coronavirus spike protein or the portion thereof is linked to form a protein multimerizing/nanoparticle subunit by a peptide linker in a sortase reaction, or is directly linked to the protein multimerizing/nanoparticle subunit. In certain embodiments, the protein nanoparticle subunit is a ferritin nanoparticle subunit.

[0075] In certain aspects the invention provides a protein nanoparticle, comprising any one of the protein immunogens of the invention.

[0076] In certain aspects the invention provides a virus-like particle comprising any one of the immunogens of the invention.

[0077] In certain aspects the invention provides an isolated nucleic acid molecule encoding a protomer of the modified coronavirus spike protein of the invention. In certain embodiments, the nucleic acid molecule is operably linked to a promoter. In certain embodiments, the nucleic acid molecule is an RNA molecule.

[0078] In certain aspects, the invention provides a vector comprising a nucleic acid molecule encoding any one of the inventive proteins. In certain embodiments, the vector is a viral vector.

[0079] In certain aspects, the invention provides an immunogenic composition comprising any one of the proteins and/or nucleic acids of the invention, and a pharmaceutically acceptable carrier.

[0080] In certain aspects, the invention provides a method of producing a recombinant coronavirus protein of the invention, comprising: expressing the nucleic acid molecule or vector comprising a nucleic acid encoding in a host cell to produce the recombinant protein, which in certain embodiments is a trimer; and purifying the recombinant protein.

[0081] In certain aspects, the invention provides a recombinant cell comprising a nucleic acid encoding the modified coronavirus spike protein of the invention.

[0082] In certain aspects the invention provides a method for generating an immune response to a coronavirus, including but not limited to an SARS-CoV-1, SARS-CoV-2 or any other coronavirus in a subject, comprising administering to the subject an effective amount of any one of the immunogens, wherein the immunogen is a recombinant protein of the invention, a nucleic acid encoding these, and/or a combination thereof to induce an immune response. In certain embodiments, the recombinant protein is formulated with any suitable adjuvant. In certain embodiments, the nucleic acid is DNA which could be administered by any suitable method. In certain embodiments, the nucleic acid is an mRNA, which could be administered by any suitable methods. In certain embodiments, the mRNA is formulated in an LNP. A skilled artisan can readily determine the dose and number of immunizations needed to induce immune response. Various assays are known and used in the art to measure to level, breadth and durability of the induced immune response.

[0083] In certain embodiments, the immune response treats, prevents or inhibits infection with coronavirus, including but not limited to the SARS-CoV-1, SARS-CoV-2 virus or any variant thereof. In certain embodiments, the immune response generated by the immunogens inhibits replication of coronavirus, including but not limited to the SARS-CoV-1, SARS-CoV-2 or any variant in the subject.

### BRIEF DESCRIPTION OF DRAWINGS

[0084] FIG. 1a-j. SARS-CoV-2 receptor binding domain (RBD) sortase conjugated nanoparticles (scNPs) elicits extremely high titers of SARS-CoV-2 pseudovirus neutralizing antibodies. FIG. 1a. SARS-CoV-2 RBD nanoparticles were constructed by expressing RBD with a C-terminal sortase A donor sequence (blue and red) and a Helicobacter pylori ferritin nanoparticle with N-terminal sortase A acceptor sequences (gray) on each subunit (top left). The RBD is shown in blue with the ACE2 binding site in red. The RBD was conjugated to nanoparticles by a sortase A (SrtA) enzyme conjugation reaction (top right). The resultant nanoparticle is modeled on the bottom left. Nine amino acid sortase linker is shown in orange. Two dimensional class averages of negative stain electron microscopy images of actual RBD nanoparticles are shown on the bottom right. FIG. 1b. Antigenicity of RBD nanoparticles determined by biolayer interferometry against a panel of SARS-CoV-2 antibodies and the ACE2 receptor. Antibodies are color-coded based on epitope and function. N-terminal domain (NTD), nonAbs IE, infection enhancing non-neutralizing antibody; nAb, neutralizing antibody; nonAb, non-neutralizing antibody. Mean and standard error from 3 independent experiments are shown. FIG. 1c. Cynomolgus macaque challenge study scheme. Blue arrows indicate RBD-NP immunization timepoints. Intranasal/intratracheal SARS-CoV-2 challenge is indicated at week 11. FIG. 1d. Macaque serum IgG binding determined by ELISA to recombinant SARS-CoV-2 stabilized Spike ectodomain (S-2P), RBD, NTD, and Fusion peptide (FP). Binding titer is shown as area-under-the curve of the log₁₀-transformed curve. Arrows indicate immunization timepoints. FIG. 1e. Plasma antibody blocking of SARS-CoV-2 S-2P binding to ACE2-Fc and RBD neutralizing antibody DH1041. Group mean and standard error are shown. FIG. 1f. Dose-dependent serum neutralization of SARS-COV-2 pseudotyped virus infection of ACE2-expressing 293T cells. Serum was examined after two immunizations. The SARS-CoV-2 pseudovirus spike has an aspartic acid to glycine change at position 614 (D614G). Each curve represents a single macaque. SARS-CoV-2 RBD nAb DH1043 spiked into normal human serum was used as a positive control. FIG. 1g. Heat map of serum neutralization ID50 and ID80 titers for SARS-COV-2 D614G pseudotyped virus after two immunizations. SARS-CoV-2 RBD nAb DH1043 spiked into normal human serum was used as a positive control. FIG. 1h. SARS-COV-2 D614G pseudotyped virus serum neutralization kinetics. Each curve represents a single macaque. Pre-immunization serum was used as a negative control. FIG. 1i. Comparison of serum neutralization ID50 titers from cynomolgus macaques immunized with recombinant protein RBD nanoparticles (blue) or nucleoside-modified mRNA-LNP expressing S-2P (burgundy) (**P<0.01, Two-tailed Exact Wilcoxon test n=5). Vaccinated macaque serum was collected after two immunizations. Negative and positive controls are shown as in g and h. FIG. 1j. Comparison of serum neutralization titers obtained from RBD-scNP-vaccinated macaques (blue, N=5) and SARS-CoV-2 infected humans (shades of green). Vaccinated macaque serum was collected after two immunizations. Human samples were stratified based on disease severity as asymptomatic (N=34), symptomatic (n=71), and hospitalized (N=60) (**P<0.01, Two-tailed Wilcoxon test).

[0085] FIG. 2 a-i. RBD-scNP immunization elicits higher titers of neutralizing antibodies against more transmissible or neutralization-resistant SARS-CoV-2 variants than stabilized spike mRNA-LNP vaccination. FIG. 2a,b. The position of B.1.351 RBD mutations relative to the DH1041 and DH1047 binding sites. The location of K417, E484, and N501 (spheres) are shown in the cryo-EM structures of a DH1041 (red) and b DH1047 (magenta) bound to the RBD (gray) of S trimers (PDB: 7LAA and 7LD1)²⁴. The contact surface on S for each antibody is shown as atoms outlined with dotted lines. The E484K is present in the DH1041 binding surface. DH1047 binds adjacent to all three mutations using a long HCDR3. FIG. 2c ACE2 receptor, ACE2 binding site-targeting neutralizing antibody DH1041, and cross-neutralizing antibody DH1047 ELISA binding to wildtype and mutant SARS-CoV-2 Spike RBD monomers. RBD variants contain mutations found in circulating B.1.351 and P.1 virus strains. Titers are shown as area under the log-transformed curve (log AUC) in a heatmap. FIG. 2d Comparison of serum neutralization titers for SARS-CoV-2 D614G and SARS-CoV-2 B.1.1.7 pseudoviruses from cynomolgus macaques immunized with recombinant protein RBD sortase conjugated nanoparticles (RBD-scNP; blue) or nucleoside-modified mRNA-LNP expressing S-2P (burgundy). ID50 titers (left) and ID80 titers (right) are shown. Horizontal bars are the group geometric mean (**P<0.01, Two-tailed Exact Wilcoxon test n=5). FIG. 2e Fold decrease in neutralization potency between neutralization of SARS-CoV-2 D614G and SARS-CoV-2 B.1.1.7 pseudoviruses. Fold change is shown for RBD-scNP-immunized and mRNA-LNP-immunized macaques based ID50 (left) and ID80 (right) titers. Horizontal bars are the group mean. FIG. 2f Comparison of vaccinated macaque serum neutralization ID50 (left) and ID80 titers (right) against WA-1 and B.1.351 pseudovirus. Symbols and horizontal bars are shown the same as in d (*P<0.05 and **P<0.01, Two-tailed Exact Wilcoxon test n=5). FIG. 2g Fold decrease in neutralization potency between neutralization of SARS-CoV-2 WA-1 and B.1.351 pseudoviruses. Fold change is shown the same as in e. FIG. 2h Comparison of vaccine induced neutralization of SARS-CoV-2 WA-1 and P.1 pseudovirus infection of ACE2 and TMPRSS2-expressing 293 cells. Symbols and horizontal bars are shown the same as in d (*P<0.05 and **P<0.01, Two-tailed Exact Wilcoxon test n=5). FIG. 2i Fold decrease in neutralization potency as shown in e between neutralization of SARS-CoV-2 WA-1 and P.1 pseudoviruses.

[0086] FIG. 3 a-h. RBD-scNP vaccine induction of serum cross-neutralization of SARS-related betacoronavirus infection. FIG. 3a. Sera from macaques immunized twice with RBD-scNP, S-2P mRNA-LNP, or RBD mRNA-LNP neutralize replication-competent SARS-related human (SARS-CoV-1 and SARS-CoV-2) and bat (WIV-1 and SHC014) betaCoVs. Each symbol indicates the ID50 of an individual macaque. Horizontal bars are the group mean (*P<0.05, **P<0.01, Two-tailed Exact Wilcoxon test, n=5 or 8). FIG. 3b. Comparison of serum cross-neutralization before (gray, hexagons), after two (light blue, circles) or after three (blue, diamonds) RBD scNP immunizations. Each symbol indicates the ID50 of an individual macaque. Bars indicate the group geometric mean. FIG. 3c. Plasma IgG from macaques immunized twice with RBD-scNP binds to human, bat, and pangolin SARS-related betacoronavirus S protein in ELISA. ECD, ectodomain. FIG. 3d. Cryo-electron microscopy model comparing the epitopes of SARS-CoV-2-specific neutralizing RBD antibody (DH1041) and cross-neutralizing RBD antibody (DH1047). (Left) Cartoon view of Spike bound to DH1047 (magenta; PDB ID: 7LD1) fitted in the cryo-EM map (transparent gray; EMD-23279). Receptor Binding Domain (RBD) is in gray, Receptor Binding Motif (RBM) is in blue, and the rest of Spike is in forest green. (Top, right) Zoomed-in surface view of RBD (gray) and RBM (blue) binding interface with DH1047 (magenta) compared to the neutralizing RBD antibody DH1041 (red; PDB ID: 7LAA; EMD-23246). The RBDs of the two complexes from their respective cryo-EM structures were overlaid for comparison. (Bottom, right) A 180° rotated view of the top-right panel. FIG. 3e. DH1047 epitope is conserved within group 2b betaCoVs. Receptor binding domain (surface representation) colored by conservation within group 2b betacoronaviruses. DH1047 epitope is shown in magenta outline. FIG. 3f. Sequence similarity of RBD for representative betacoronaviruses. Heatmaps displaying pairwise amino acid sequence similarity for 57 representative betacoronaviruses. Dark blue shading indicates high sequence similarity. FIG. 3g. Macaque plasma antibody blocking of SARS-CoV-2 and batCoV-SHC014 S-2P binding to ACE2-Fc (gray) and RBD cross-neutralizing antibody DH1047 (navy blue). Group mean and standard error are shown (n=5). Blocking above 20% (above the dashed line) is considered positive. FIG. 3h. Human serum or macaque plasma antibody blocking of ACE2 (left) and DH1047 (right) binding to SARS-CoV-2 diproline-stabilized spike ectodomain (S-2P). Macaques were immunized with RBD-scNP or S-2P mRNA-LNP twice. Humans were immunized with Pfizer BNT162b2 twice or naturally infected with SARS-CoV-2. Each symbol represents a vaccinated macaque, vaccinated human, or infected individual. Filled bars indicate group mean.

[0087] FIG. 4 a-g. RBD-scNP vaccination alone or as a boost completely prevents virus replication in the upper and lower respiratory tract after intranasal and intratracheal SARS-CoV-2 challenge in nearly all macaques. FIG. 4a. Macaque intranasal/intratracheal SARS-CoV-2 challenge study design. Blue and maroon arrows indicate the time points for RBD-scNP and mRNA-LNP immunizations respectively. Challenge occurred 3 and 9 weeks after the final immunization for the RBD-scNP group and S-2P mRNA-LNP/RBD-scNP group respectively. Biospecimens were collected as indicated by the green and orange arrows and challenge occurred. FIG. 4b Infectious virus in macaque BAL fluid two days after challenge. FIG. 4c-f. Quantification of viral subgenomic RNA (sgRNA) in unimmunized (gray) and RBD-scNP-immunized (blue), and S-2P mRNA-LNP prime/RBD-scNP boosted (maroon) macaques. sgRNA encoding the c, d envelope (E) gene or e, f nucleocapsid (N) gene of SARS-CoV-2 was quantified two (left) and four (right) days after SARS-CoV-2 challenge. E or N gene sgRNA was measured in both c, e nasal swabs and d, f bronchoalveolar lavage (BAL) fluids from each macaque. Limit of detection (LOD) for the assay is 150 copies/mL. Each symbol represents an individual macaque with the group mean shown with a horizontal bar. FIG. 4g Nucleocapsid immunohistochemistry of lung tissue sections seven days post challenge. A representative image from one macaque from each group is shown. Red arrows indicate site of antigen positivity. All images are shown at 10× magnification with 100 micron scale bars shown in the bottom right corner. Quantification of antigen positivity observed is shown in the graph. The group mean score is shown by a horizontal bar.

[0088] FIG. 5A-D. Molecular and structural characterization of the SARS-CoV-2 RBD sortase A conjugated nanoparticle. FIG. 5a Size exclusion chromatography of RBD and ferritin sortase conjugation. The first peak shows conjugated protein. The second peak contains unconjugated RBD. FIG. 5b Analytical size exclusion trace shows a homogenous nanoparticle preparation. FIG. 5c Negative stain electron microscopy image of RBD-scNPs on a carbon grid. Inset shows a zoomed image of RBD-scNP. The zoomed image shows RBD molecules arrayed around the outside of the ferritin nanoparticle. FIG. 5d Chemical structure of toll-like receptor 7 and 8 agonist 3M-052. Alum formulation of 3M-052 was used to adjuvant RBD-scNP immunization.

[0089] FIG. 6A-C. Macaque immunization and challenge study designs. FIG. 6a RBD-scNP immunization regimen used for vaccination of cynomolgus macaques (N=5). Blue arrows indicate timepoints for intramuscular immunizations with RBD-scNP (100 μg) adjuvanted with 3M-052 (5 μg 3M-052 plus 500 μg Alum). Bronchoalveolar lavage (BAL, orange arrows) and nasal swab (green arrows) fluids were collected 7 days before, 2 days after, and 4 days after intratracheal/intranasal SARS-CoV-2 challenge (black arrow). FIG. 6b Transmembrane, diproline-stabilized spike (S-2P) mRNA-LNP prime, RBD-scNP boost vaccination of cynomolgus macaques (N=5). Maroon arrows indicate timepoints for S-2P mRNA-LNP immunization (50 μg mRNA dose). Blue arrows are the same as in FIG. 6a. Macaques were challenged 9 weeks after RBD-scNP boost (week 17 of the study). BAL and nasal swab fluids were collected as in FIG. 6a. Macaques were challenged at week 17 (black arrow). FIG. 6c Monomeric RBD mRNA-LNP immunization of rhesus macaques (N=8). Tan arrows indicate timepoints for RBD mRNA-LNP immunization (50 μg mRNA dose). Blood was collected throughout each study as shown by red arrows in all panels.

[0090] FIG. 7. Blood chemical analysis and blood cell counts in RBD-scNP and S-2P mRNA-LNP-vaccinated macaques. Each graph shows values for individual macaques before vaccination and 4 weeks after the RBD-scNP (week 8) or 6 weeks after the second S-2P mRNA-LNP immunization (week 10). RBD-scNP-immunized macaques are shown as blue symbols, and S-2P mRNA-LNP immunized macaques are shown as red symbols. The reference range for each value is shown as gray shaded area for female macaques and cyan shaded area for male macaques. Creatine kinase does not have a reference range indicated. Males are shown as circles and females are shown as triangles.

[0091] FIG. 8A-F. ACE-2, RBD neutralizing antibody, and post-vaccination macaque plasma IgG binding to SARS-CoV-2 Spike variants. FIG. 8a,b Plasma IgG from macaques prior to immunization or after being immunized once with RBD-scNP adjuvanted with 3M-052-Alum (blue), RBD-scNP only (gray), or 3M-052-Alum only (white). Binding titers as log AUC were determined a before or b two weeks after a single immunization. Horizontal bars are the group mean. ECD, ectodomain; S-2P, diproline-stabilized spike. FIG. 8c ACE2 receptor and cross-neutralizing antibody DH1047 ELISA binding to SARS-CoV-2 Spike ectodomain (ECD) based on a Danish mink (H69/V70deI/Y453F/D614G/I692V), B.1.351-like (K417N/E484K/N501Y/D614G), and B.1.1.7 (H69/V70del/Y144del/N501Y/A570D/D614G/P681H/T7161/S982A/D1118H) strains. Titers are shown as area under the log-transformed curve (log AUC). FIG. 8d RBD-scNP and S-2P mRNA-LNP-immunized macaque serum IgG ELISA binding to SARS-CoV-2 Spike variants shown in c. Serum was tested after two immunizations. Horizontal bars are the group mean. FIG. 8e ACE2 receptor (gray), cross-neutralizing antibody DH1047 (navy), and ACE2 binding site-targeting neutralizing antibody DH1041 (green) ELISA binding to SARS-CoV-2 Spike RBD monomers. RBD variants contain a subset of mutations found in circulating B.1.351 and P.1 virus strains. Titers are shown as area under the log-transformed curve (log AUC). FIG. 8f RBD-scNP and S-2P mRNA-LNP-immunized macaque serum IgG ELISA binding to SARS-CoV-2 Spike RBD variants shown in e. Serum was tested after two immunizations. Horizontal bars are the group mean.

[0092] FIG. 9. Cross-neutralizing antibodies are elicited by recombinant protein RBD-scNP and mRNA-LNP immunization. Each row shows neutralization titer for an individual macaque immunized with one of the three immunogens. A reciprocal serum dilution titer of 87,480 is the upper limit of detection and 20 is the lower limit of detection for this assay. Titers are derived from a nonlinear regression curve fit to the average of duplicate measurements.

[0093] FIG. 10A-D. Cross-reactive plasma antibody responses elicited by RBD-NP immunization in macaques. FIG. 10a Plasma IgG from macaques immunized twice with RBD-scNP binds to Spike from human, bat, and pangolin SARS-related coronavirus Spike (S) in ELISA, but not endemic human coronaviruses or MERS-CoV. ECD, ectodomain. FIG. 10b Determination of DH1047 antigen binding fragment (Fab) binding kinetics to RBD monomer by surface plasmon resonance. Each curve shows a different concentration of DH1047 Fab. Binding kinetics are shown to the right from a 1:1 model fit. FIG. 10c Time course of vaccinated macaque plasma IgG binding to human, bat, and pangolin coronavirus S protein by ELISA. Each curve indicates the binding titer for an individual macaque. Arrows indicate immunization time points. FIG. 10d Unimmunized macaque plasma antibody blocking of SARS-CoV-2 S-2P (left) and batCoV-SHC014 (middle) binding to ACE2-Fc, RBD neutralizing antibody DH1041, and RBD cross-neutralizing antibody DH1047. (RIght) Blocking activity in the serum of humans immunized with Pfizer S-2P mRNA-LNP vaccine (N=4). Each symbol represents an individual human or macaque. Black horizontal bars indicate group mean and standard error.

[0094] FIG. 11A-B. Sequence conservation among SARS-related betaCoV, MERS-CoV, and endemic human CoVs. Sequence similarity of RBD in 11A and spike protein in 11B for representative betacoronaviruses. Heatmaps displaying pairwise amino acid sequence similarity for 57 representative betacoronaviruses. Dark blue shading indicates high sequence similarity.

[0095] FIG. 12A-C. Phylogenetic tree of representative betacoronavirus RBD sequences. Group 2b betaCoVs of interest are shown highlighted in red: LIST THE NAMES. Branch length units are substitutions per site. FIG. 12A shows the entire tree, FIG. 12B shows enlarged view of the two main branches from the top portion of tree, and FIG. 12C shows enlarged view of the bottom main branch.

[0096] FIG. 13. Multiple Sequence Alignment of Spike Protein from a Representative Set of Group 2b Betacoronaviruses. SARS-CoV-2 Wuhan-1 spike protein numbering is shown. NTD=N-terminal domain; RBD=receptor binding domain; S1/S2=SARS2 furin cleavage site; FP=fusion peptide; HR1=heptad repeat 1; HR2=heptad repeat 2; CH=central helix; CD=connecting domain; TM=transmembrane domain. ACE2 contact positions in SARS2 (calculated from PDB coordinates 6MOJ and 6LZG) are highlighted in dark red. Figure discloses SEQ ID NOS 56-67, respectively, in order of appearance.

[0097] FIG. 14. Serum neutralization titers elicited by two S-2P mRNA-LNP immunizations were boosted by a subsequent RBD-scNP immunization. FIG. 14a,b Serum neutralization of a SARS-CoV-2 D614G and b SARS-CoV-2 B.1.1.7 pseudovirus infection of ACE2-expressing 293 cells. Neutralization titers are ID50 as reciprocal serum dilution for serum collected two weeks after the second (week 6) and third immunization (week 10). Each symbol connected by a line represents the titer for an individual macaque before and after RBD-scNP immunization. Normal human serum spiked with DH1043 was used as a positive control.

[0098] FIG. 15. Histology and immunohistochemistry of lung tissue collected seven days after SARS-CoV-2 WA-1 intratracheal and intranasal challenge. FIG. 15a-c Macaques were immunized a thrice with RBD-scNP, b twice with S-2P mRNA-LNP and once with RBD-scNP, or c unimmunized. Each column shows results from an individual macaque. The macaque identification number is shown herein each column. Hematoxylin and eosin stain of lung sections are shown on the top row, with nucleocapsid immunohistochemistry shown on the bottom row for each macaque. Red arrows indicate site of antigen positivity. All images are shown at 10× magnification with 100 micron scale bars shown in the bottom right corner.

[0099] FIG. 16. Mucosal SARS-CoV-2 IgG responses in bronchoalveolar lavage (BAL) and nasal wash fluids before and after SARS-CoV-2 challenge. FIG. 16a ELISA binding titers for SARS-CoV-2-specific IgG in 10×BAL fluid from macaques immunized with (blue symbols, left column) RBD-scNP three times or S-2P mRNA-LNP twice and RBD-scNP once (red symbols, left column). Day −7 BAL fluid was collected at week 10 or 16 for the RBD-scNP alone group or the S-2P mRNA-LNP/RBD-scNP group respectively. Group mean and standard error are shown (N=5). FIG. 16b-d 10×BAL fluid blocking of ACE2, RBD neutralizing antibody DH1041, and cross-neutralizing antibody DH1047 binding to SARS-CoV-2 D614G stabilized spike ectodomain. A black horizontal bar indicates the group mean blocking percentage. Blocking above 20% (above the dashed line) is considered positive. FIG. 16e Neat nasal wash fluid from RBD-scNP-immunized or S-2P mRNA-LNP/RBD-scNP-immunized macaques. Day −7 nasal wash fluid was collected at week 16 and 2 and 4 days post challenge for the S-2P mRNA-LNP/RBD-scNP group. Nasal wash fluid was unavailable for the RBD-scNP before challenge, but was collected 2 and 4 days after the week 11 challenge. Group mean and standard error are shown (N=5).

[0100] FIG. 17. Scoring of Hematoxylin and Eosin (H&E) staining and immunohistochemistry (IHC) of macaque lung tissue collected seven days after challenge.

[0101] FIG. 18A-C shows non-limiting embodiments of amino acid (18B) and nucleic acid sequences (18A) of the invention. In FIG. 18B, spike and RBD portions are bolded. In this figure: Purple (underlined)=signal peptide; Orange=sortase A donor sequence (LPETGG (SEQ ID NO: 16)); Red=HRV3C cleavage site; 8×His tag (SEQ ID NO: 17), twin-StrepTagII (LEVLFQGPGHHHHHHHHSAWSHPQFEKGGGSGGGGSGGSAWSHPQFEK (SEQ ID NO: 18)); Cyan=8×His tag (SEQ ID NO: 17), twin-StrepTagII, HRV3C cleavage site (SAWSHPQFEKGGGSGGGGSGGSAWSHPQFEKHHHHHHHHLEVLFQGP (SEQ ID NO: 19)); Pink=Glycine-serine spacer (GSGS (SEQ ID NO: 20)). Figure shows sequences of soluble SARS-CoV-2 receptor binding domain (RBD) proteins-bold. In some embodiments, the RBD has been modified to include 417, 484, and 501 mutations found in circulating coronaviruses that may have escaped neutralizing antibodies or have a replication fitness advantage. The RBD sequences include a c-terminal sortase A donor sequence to allow for site specific conjugation to scaffolds expressing the n-terminal sortase A acceptor sequence. The donor sequence is a LPETGG (SEQ ID NO: 16) where the third amino acid can vary. The acceptor sequence is composed of 5 or more glycines (SEQ ID NO: 21) appended to the N-terminus. For protein purification purposes, the RBD subunits contain an HRV-3C cleavable His tag and twin streptagII. FIG. 18B-7 shows sequence of the n-terminal domain of SARS-CoV-2 with a C-terminal sortase A tag. For purification it includes an N-terminal His tag and twin streptagII followed by a HRV-3C cleavage site. HV1302346 and HV1302347 are spikes from South African variants of SARS-CoV-2. The variants include mutations at 417, 484, and 501, which are proximal to RBD antibody neutralizing epitopes. Each strain is designed as a HexaPro Spike ectodomain with a sortase A donor sequence appended to its c-terminus. For purification of the Spike, an HRV-3C cleavable His and twin streptagII sequence was added to the c-terminus. FIG. 18C1-15 shows non-limiting embodiments of amino acid sequences of the invention connected via linker to a self-assembling protein/a multimerization domain, e.g. ferritin protein. Sortase conjugate nanoparticles can be made by displaying human or animal coronavirus receptor binding domain. Receptor binding domains can include MERS-CoV (defined as amino acids 381 to 589 of spike), SARS-CoV-1, Canine CoV-HuPn, Bat CoV-WIV-1, Bat CoV SHC014, Pangolin CoV GXP4L, or Porcine CoV from Haiti. In FIG. 18C-1 the sequence shows one embodiment of a spike protein sequence—an RBD domain (bolded and underlined) after sortase conjugation. K417N, E484K, and N501Y are three mutations observed in the RBD of SARS-CoV-2 strain B1.135, which was recently sequenced in South Africa. These three mutations alone or in combination render the virus less sensitive to RBD neutralizing antibodies. The sequence shows one embodiment of ferritin sequence (italicized), and one embodiment of a linker (double underlined). FIGS. 18C2-15 show additional embodiments of ferritin multimeric fusion protein complexes/nanoparticles. The underlined sequence is a signal peptide. In some embodiments, the ferritin sequence comprises N19Q amino acid change. FIG. 18A discloses SEQ ID NOS 68-83, FIG. 18B discloses SEQ ID NOS 84-86, 84, and 87-97, FIG. 18C discloses SEQ ID NOS 97-107, 106, and 108-110, respectively, in order of appearance.

[0102] FIG. 19A-B show non-limiting embodiments of sortase designs and a schematic of a sortase reaction conjugating a protein to a lipid (cholesterol) molecule. The protein could be any spike protein design or portion thereof, e.g. but not limited to the ectodomain, RBD, NTD, or FP. The linker between the protein sequence and the ferritin protein sequence could be any suitable linker. In non-limiting embodiments, the lipid molecule could be substituted with a protein which multimerizes, e.g. but not limited to ferritin. Figure discloses SEQ ID NOS 111-116, respectively, in order of appearance.

[0103] FIG. 20A-B show non-limiting embodiments of nucleic acid (A) and amino acid sequences of the invention (B). In FIG. 20B, signal peptide underlined, in some sequences a sortase A tag/linker is italicized-GSGLPETGG (SEQ ID NO: 22). FIG. 20A discloses SEQ ID NOS 117-134, 75-78, and 135-146, FIG. 20B discloses SEQ ID NOS 147-164, 90-93, 165-170, 169, and 171-175, and FIG. 20C discloses SEQ ID NOS 176-177, all respectively, in order of appearance.

[0104] FIG. 21A-D. FIG. 21A shows truncation of the SARS-CoV-2 spike protein down to the RBD core (“RBDcore_ext”). Ribbon structure of the SARS-CoV-2 ectodomain with successive trimming of the protein down to the RBD core (moving from left to right). The red sphere indicates the N-terminus of the RBD core and the green indicates the C-terminus of the RBD core. The two spheres correspond to amino acid positions: Green=amino acid 333 and Red=527. FIG. 21B shows the positions of amino acid 333 and 527 in the RBDscNP sequence of SEQ ID NO: 97. The core RBD design is HV1302728v2—does not include linker/tag or ferritin. FIG. 21C shows one embodiment of a nucleic acid sequence and amino acid sequence of RBD core design of the SARS CoV2 Wuhan sequence. Underlined is the signal peptide. FIG. 21D shows one embodiment of a nucleic acid sequence of RBD core design of the SARS CoV2 Wuhan sequence. FIG. 21B discloses SEQ ID NO: 97, FIG. 21C discloses SEQ ID NOS 178-179, and FIG. 21D discloses SEQ ID NO: 180.

[0105] FIGS. 22A and 22B show non-limiting embodiments of nucleic acid and amino acid sequences of the invention-RBD and NTD designs. In this figure amino acid sequences comprise: a signal peptide, underlined in some of the amino acid sequences: MGWSCIILFLVATATGVHA (SEQ ID NO: 23) or MDSKGSSQKGSRLLLLLVVSNLLLPQGVLA (SEQ ID NO: 24) or MPMGSLQPLATLYLLGMLVASVLA (SEQ ID NO: 25) or MFVFLVLLPLVSS (SEQ ID NO: 26); C terminal sortase A tag, italicized and bolded in sequence HV1302967, BA.2RBDcoreExtKK_mVHss_3CST2: LPETGG (SEQ ID NO: 16) or LPSTGG (SEQ ID NO: 27); HRV-3C protease site, italicized and underlined: LEVLFQGP (SEQ ID NO: 28); His Tag: HHHHHHHH (SEQ ID NO: 17); C tag: EPEA (SEQ ID NO: 30); Twin streptag II: SAWSHPQFEKGGGSGGGGSGGSAWSHPQFEK (SEQ ID NO: 31), or strep tagII. Spike protein sequence or portion thereof (RBD or NTD) are shown as bolded amino acid sequences in representative sequences. The Spike ectodomain (HV1302119; 1-1146) and N-terminal domain (HV1302120 and HV1302125; amino acids 14-307) of Wuhan-1 strain of SARS-CoV-2 are shown. Two isolates of the Spike ectodomain of SARS-CoV-2 Beta variant (HV1302346 and HV1302347) are shown. The Spike proteins are purified to homogeneity to ensure high quality proteins. Following initial purification each of these constructs can be ligated to nanoparticle scaffolds via the C-terminal sortase tag (LPxTGG (SEQ ID NO: 32)). In the presence of the enzyme soratase A, C-terminal sortase A tag is covalently bonded to an acceptor sortase A sequence on a protein of interest that can multimerize as a nanoparticle, e.g. without limitation ferritin protein. The sortase reaction A sortase conjugated immunogen does not comprise the signal peptide and any of the amino acids after the end of the sortase tag. FIG. 22A discloses SEQ ID NOS 181-187, 82-83, and 188-191, FIG. 22B discloses SEQ ID NOS 192-204, respectively, in order of appearance.

[0106] FIG. 23A-C show non-limiting embodiments of nucleic acid and amino acid sequences of the invention fusion designs. FIG. 23A shows non-limiting embodiments of nucleic acid sequences (SEQ ID NOS 205-216). FIG. 23B shows non-limiting embodiments of amino acid sequences (SEQ ID NO: 217-228). Mouse heavy chain variable region signal peptide:

(SEQ ID NO: 23)
MGWSCIILFLVATATGVHA (underlined).

Bovine prolactin signal peptide:

(SEQ ID NO: 24)
MDSKGSSQKGSRLLLLLVVSNLLLPQGVLA (Underlined).

Glycine-serine linker (underlined and bolded): GGS. One embodiment of a rigid linker (italicized and bolded): EKAAKAEEAAR (SEQ ID NO: 9). Other embodiments of a rigid linker: EKAAKAEEAARPP (SEQ ID NO: 11) or EKAAKAEEAARP (SEQ ID NO: 10). HRV-3C protease site: LEVLFQGP (SEQ ID NO: 28). StrepTagII purification tag: SAWSHPQFEK (SEQ ID NO: 33). In some sequences the ferritin sequence is double underlined. In some embodiments, T. ni ferritin designs comprise a glycine serine linker followed immediately by a rigid linker. FIG. 23C shows non-limiting embodiments of ferritin sequences (SEQ ID NOS 229-231).

[0107] FIG. 24A-B. Nanoparticle (NP) platform for bivalent betacoronavirus vaccine. FIG. 24A. Surface representation of the structure of the two-component T. ni ferritin. the heavy chain component is colored blue and the light chain component is colored red (PDB:1Z60). FIG. 24B. negative stain electron microscopy images of T. ni ferritin NPs displaying HIV-1 fusion peptide or HIV-1 Env gp140 trimers.

[0108] FIG. 25A-E. RBD ferritin nanoparticles with long linkers are predicted not to display RBD on their surface. FIG. 25A. Amino acid sequence of RBD-ferritin fusion protein with a 25 amino acid linker without signal peptide. Ferritin (gray), SARS-CoV-2 RBD (blue), rigid helical 11 aa linker (magenta) and 14 aa flexible glycine-serine linker (green). Sequence in FIG. 25A is >HV1302891 (signal peptide underlined). FIG. 25B. Model of the predicted structure of a single H. pylori ferritin subunit fused with rigid helical 11 aa linker and 14 aa flexible glycine-serine linker to SARS-CoV-2 RBD. Colors are shown as in A. Model was predicted with AlphaFold. B. Heatmap of the certainty of the position of each amino acid in the model. Orange and red means high certainty and blue and green means low certainty. FIG. 25C,D. Alignment of predicted model of RBD-ferritin fusion with the structure of FIG. 25C. three ferritin subunits (yellow) or FIG. 25D. an intact 24-subunit nanoparticle shows the RBD (blue) and the ferritin C-terminus (red dot) are predicted to be inside the nanoparticle. FIG. 25A discloses SEQ ID NOS 232 and 217, respectively, in order of appearance.

[0109] FIG. 26A-B. RBD ferritin nanoparticle redesigned with a 11aa rigid linker and a 3 aa flexible linker displays RBD on the surface. FIG. 26A. A single subunit of the RBD (blue) fused to ferritin (gray) by a flexible 3 aa Glycine serine linker (green) and a rigid helical linker (magenta). Purification tag is shown in white. FIG. 26B. Surface representation of a model of the predicted structure of RBD fused to H. pylori ferritin and assembled as a 24-subunit nanoparticle. Burgundy and gold indicate RBDs and gray shows ferritin.

[0110] FIG. 27A-B. High-throughput expression screening of SARS-CoV-1 and MERS-CoV ( ) receptor binding domain nanoparticles. FIG. 27A,B. Each nanoparticle was expressed in a 6 mL cell culture for three days. Secreted protein present in the cell culture media was harvested concentrated and 20 microliters was used for a (27A) denaturing, reduced Western blot or (27B.) biolayer interferometry binding assay. Western blot primary antibody detected a N-terminal StrepTagII sequence on each protein. A mock was performed and cell culture media from a transfection (Mock Txn) was used as a negative control for the experiments. SARS-CoV-2 receptor binding domain monomers were used as a positive control.

[0111] FIG. 28A-D. RBD-scNP vaccination elicits broad neutralizing antibodies against SARS-CoV-2 variants. FIG. 28A, Schematic of the vaccination study in macaques. Cynomolgus macaques (n=5 per group) were immunized intramuscularly 3 times with 100 μg of RBD-scNP adjuvanted with 3M-052-AF+Alum. The control group was immunized with PBS. Blood and mucosal samples, including Bronchoalveolar lavage (BAL) and nasal swab samples, were collected in the indicated time points for antibody assays. FIG. 28B-C. Plasma antibody (post-3rd immunization) neutralization of SARS-CoV-2 variants pseudovirus infection of 293T-ACE2-TMPRSS2 cells. (b) Neutralization titers were shown as 50% inhibitory dilution (ID50). (c) Reduction of neutralization titers against variants were shown as fold reduction compared to the titers against WA-1. FIG. 28D. Plasma antibody (post-3rd immunization) neutralization titers against pseudoviruses of the SARS-CoV-2 Omicron variants in 293T-ACE2 cells. The mean ID50 and ID80 titers and the fold reduction compared to D614G are shown.

[0112] FIG. 29A-F. Two doses of RBD-scNP vaccination elicited in vivo protection from SARS-CoV-2 WA-1, B.1.351 (Beta) or B.1.617.2 (Delta) variant infection. FIG. 29A. Schematic of the vaccination and viral challenge study. Cynomolgus macaques were immunized with 2 doses of RBD-scNP adjuvanted with 3M-052-AF+Alum or the indicated negative controls. Monkeys were intranasally and intratracheally challenged with SARS-CoV-2 WA-1 strain (n=5) or B.1.351 (n=5) or B.1.617.2 (n=5) at week 6. Lower and upper respiratory tract samples were collected on day 0, 2 and 4 post challenge for subgenomic (sgRNA) viral replication test. Animals were necropsied on day 4 post-challenge and organs were collected for pathologic analysis. FIG. 29B-D. SARS-CoV-2 subgenomic RNA (sgRNA) levels for Envelop (E) gene and Nucleocapsid (N) gene in BAL and nasal swab samples collected on Day 2 and 4 after SARS-CoV-2 WA-1 virus challenge, SARS-CoV-2 WA-1 (b), Beta variant challenge (c) or Delta variant challenge (d). Dashed line indicates limit of the detection (150 copies/ml). FIG. 29E-F. Lung inflammation and SARS-CoV-2 viral antigen expression of the SARS-CoV-2 WA-1 virus challenged animals (e) and the Beta variant challenged animals (FIG. 29f). Lung sections from each animal were scored for inflammation by hematoxylin and eosin (H&E) staining, and for the presence of SARS-CoV-2 nucleocapsid by immunohistochemistry (IHC) staining.

[0113] FIG. 30A-H. RBD-scNP vaccine protected aged mice from SARS-CoV-2 Beta variant, SARS-CoV-1, and bat CoV RsSHC014 challenge. Aged female BALB/c mice (n=10 per group) were immunized intramuscularly with RBD-scNP formulated with 3M-052-AF+Alum (for the SARS-CoV-2 WA-1, SARS-CoV-2 Beta variant and RsSHC014 study) or with GLA-SE (for the SARS-CoV-1 study). For the SARS-CoV-2 WA-1 and RsSHC014 study, mice were immunized on week 0 and 2, and challenged on week 7. For the SARS-CoV-2 B.1.351 and SARS-CoV-1 study, mice were immunized on week 0 and 4, and challenged on week 6. Body weights were monitored daily and lungs infectious virus titer were measured in one lung lobe collected 2 days post-infection (2 dpi) or 4 days post-infection (4 dpi). FIG. 30A-B. SARS-CoV-2 mouse-adapted 10 (MA10) WA-1 challenge. (a) Weight loss and (b) lung infectious virus titers at 4 dpi. FIG. 30C-D. SARS-CoV-2 MA10 Beta variant challenge. (c) Weight loss and (d) lung infectious virus titers at 2 dpi. FIG. 30E-F. SARS-CoV-1 mouse-adapted 15 (MA15) challenge. (e) Weight loss and (f) lung infectious virus titers at 2 dpi. FIG. 30G-H. Bat CoV RsSHC014 mouse-adapted 15 (MA15) challenge. (g) Weight loss and (h) lung infectious virus titers at 4 dpi. Statistical significance in all the panels were determined using Wilcoxon rank sum exact test. Asterisks show the statistical significance: ns, not significant, *P<0.05, **P<0.01, ***P<0.001, ****P<0.0001. LOD: Limit of detection.

[0114] FIG. 31A-F. Neutralizing antibodies and in vivo protection elicited by RBD-scNP vaccine formulated with three different adjuvants. FIG. 31A. Schematic of the vaccination and viral challenge study. Cynomolgus macaques (n=5 per group) were immunized intramuscularly for 3 doses with 100 μg of RBD-scNP adjuvanted with 3M052-AF+Alum, Alum, 3M052-AF, or PBS control. Animals injected with adjuvant alone or PBS were set as control groups. Monkeys were intranasally and intratracheally challenged with SARS-CoV-2 WA-1 at week 11. Blood samples were collected in week 0, 2, 6, 10. Lower and upper respiratory tract samples were collected on day 0, 2 and 4 post challenge for subgenomic RNA (sgRNA) viral replication test. Animals were necropsied on day 4 post-challenge, and organs were collected for pathologic analysis. FIG. 31B-C. Vaccine-induced neutralization titers against SARS-CoV-2 WA-1 and variants. Plasma samples collected after the third vaccination were tested in neutralization assays against pseudovirus viruses in 293T-ACE2-TMPRSS2. (b) Neutralization titers were shown as 50% inhibitory dilution (ID50). (c) Reduction of neutralization titers against variants were shown as fold changes over the titers against WA-1. Animal groups were indicated on the left. FIG. 31D-E. SARS-CoV-2 sgRNA viral replication assays. SARS-CoV-2 E gene or N gene sgRNA were quantified in BAL (d) and nasal swab (e) samples collected before challenge and on day 2 and 4 post-challenge. Dashed line indicates limit of the detection (150 copies/ml). FIG. 31F. Lung inflammation and SARS-CoV-2 viral antigen expression of the challenged animals. Lung sections from each animal were scored for inflammation by H&E staining, and for the presence of SARS-CoV-2 nucleocapsid by IHC staining. Statistical significance in all the panels were determined using Wilcoxon rank sum exact test. Asterisks show the statistical significance: ns, not significant, *P<0.05.

[0115] FIG. 32A-I. NTD-scNP and S2P-scNP protected macaques from SARS-CoV-2 WA-1 infection in both lower and upper respiratory tracts. FIG. 32A. Schematic of the vaccination and viral challenge study in macaques. Cynomolgus macaques (n=5 per group) were immunized intramuscularly for 3 times with 100 μg of RBD-scNP, NTD-scNP, or S2P-scNP adjuvanted with 3M-052-AF+Alum. The control group was immunized with PBS. Blood samples were collected at weeks 0, 2, 6, 10 and monkeys were intranasally and intratracheally challenged with SARS-CoV-2 WA-1 strain at week 11. Lower and upper respiratory tract samples were collected on days 0, 2 and 4 post-challenge for sub-genomic (sgRNA) RNA viral replication assays. Animals were necropsied on day 4 post-challenge, and organs were collected for pathologic analysis. FIG. 32B. Negative-stain electron microscopy of RBD-scNP, NTD-scNP, and S2P-scNP. The insets show zoomed-in image of a representative scNPs. The 2D class averaging of 14,300 RBD-scNP particles, 10,800 NTD-scNP particles or 1,034 S2P-scNP particles were generated using RELION. The size of each box is 257 Å, 257 Å, and 1,029 Å for RBD-scNP, NTD-scNP and S2P-scNP, respectively. FIG. 32C. Pseudovirus neutralization. Plasma samples collected in week 0, 2, 6 were tested in neutralization assays against pseudotyped SARS-CoV-2 D614G strain in 293T/ACE2.MF cells. FIG. 32D. Live virus neutralization of the NTD-scNP-induced antibodies. Plasma samples from the NTD-scNP group collected in week 6 and 10 were tested in neutralization assays against live SARS-CoV-2 virus in Vero-E6 cells. FIG. 32E-F. Plasma antibody neutralization titers against pseudoviruses of the SARS-CoV-2 variants in 293T-ACE2-TMPRSS2 cells. (e) Neutralization titers were shown as 50% inhibitory dilution (ID50). (f) Reduction of neutralization titers of the S2P-scNP group against variants were shown as fold changes over the titers against WA-1. Statistical significance in all the panels were determined using Wilcoxon rank sum exact test. Asterisks show the statistical significance: ns, not significant. FIG. 32G-H. SARS-CoV-2 sgRNA levels for the E gene and N gene in bronchoalveolar lavage (BAL) samples (g) and nasal swab samples (FIG. 32H) collected on Day 2 and 4 post-challenge. FIG. 32I. Lung inflammation and SARS-CoV-2 viral antigen expression of the challenged animals. Lung sections from each animal were scored for inflammation by H&E staining, and for the presence of SARS-CoV-2 nucleocapsid by IHC staining.

[0116] FIG. 33A-F. Neutralizing antibodies and in vivo protection induced by the mRNA-LNP prime-scNP boost vaccination regimen against SARS-CoV-2 WA-1 infection. FIG. 33A. Schematic of the prime-boost vaccination and viral challenge study. Cynomolgus macaques (n=5 per group) were immunized intramuscularly with 2 doses of S-2P mRNA-LNP vaccine, then boosted with 100 μg of RBD-scNP, NTD-scNP, or S2P-scNP adjuvanted with 3M-052-AF+Alum. Animals in the control group were immunized with PBS. Blood samples were collected in week 0, 2, 6, 10, 16, and monkeys were intranasally and intratracheally challenged with SARS-CoV-2 WA-1 strain at week 17. Lower and upper respiratory tract samples were collected on day 0, 2 and 4 post challenge for sgRNA viral replication test. Animals were necropsied on day 4 post-challenge for pathologic analysis. FIG. 33B-C. Plasma antibody neutralization titers against pseudoviruses of the SARS-CoV-2 variants in 293T-ACE2-TMPRSS2 cells. (b) Neutralization titers were shown as 50% inhibitory dilution (ID50). (c) Reduction of neutralization titers against variants were shown as fold changes over the titers against WA-1. Animal groups and animal IDs were indicated on the left. Statistical significance in all the panels were determined using Wilcoxon rank sum exact test. Asterisks show the statistical significance: ns, not significant, *P<0.05. FIG. 33d-e. SARS-CoV-2 sgRNA levels for E gene and N gene in BAL (d) and nasal swab (e) samples collected before challenge and on Day 2 and 4 post-challenge. FIG. 33F. Lung inflammation and SARS-CoV-2 viral antigen expression of the challenged animals. Lung sections from each animal were scored for inflammation by H&E staining, and for the presence of SARS-CoV-2 nucleocapsid by IHC staining.

[0117] FIG. 34A-E. RBD-scNP elicited higher titers of neutralizing antibodies than soluble RBD. FIG. 34A. Plasma antibody binding titers to SARS-CoV-2 spike, RBD and NTD, as well as spike proteins of SARS-CoV, bat coronaviruses RaTG13, RsSHC014, and pangolin coronavirus GX-P4L. ELISA binding titers were shown by log area-under-curve (AUC). Dot and error bars indicate mean±SEM of all animals in each group. FIG. 34B-C. Plasma antibody blocking activity after the 2nd immunization. ELISA was performed to test plasma antibodies blocking ACE2, human RBD neutralizing antibodies DH1041 and DH1047 binding to SARS-CoV-2 Spike protein (b), or plasma samples blocking ACE2, DH1041 and DH1047 binding to RsSHC014 Spike protein (c). Data are expressed as percentages of blocking of ACE or the indicated antibody by 1:50 diluted plasma samples. FIG. 34D-E. Plasma antibody neutralization titers against pseudoviruses of the SARS-CoV-2 variants in 293T-ACE2-TMPRSS2 cells. (d) Neutralization titers were shown as 50% inhibitory dilution (ID50). (e) Reduction of neutralization titers against variants were shown as fold changes over the titers against WA-1.

[0118] FIG. 35A-E. Serum and mucosal antibody responses elicited by RBD-scNP formulated with three different adjuvants. Related to FIG. 31. FIG. 35A. Plasma antibody binding titers. ELISA was performed to test plasma samples binding to SARS-CoV-2 spike, RBD and NTD, as well as spike proteins of SARS-CoV, bat coronaviruses RaTG13, RsSHC014, and pangolin coronavirus GX-P4L. ELISA binding titers were shown by mean SEM of log area-under-curve (AUC). FIG. 35B-C Plasma antibody blocking activities after the 3rd immunization. ELISA was performed to test plasma samples blocking ACE2, human RBD neutralizing antibodies DH1041 and DH1047 binding to SARS-CoV-2 spike protein (b), or plasma samples blocking ACE2 and DH1047 binding to RsSHC014 spike protein (c). Data are expressed as percentages of blocking of ACE or the indicated antibody by 1:50 diluted plasma samples. FIG. 35D. Mucosal antibody binding titers in the lower and upper respiratory tracts after the 3rd immunization. ELISA was performed to test 10× concentrated bronchoalveolar lavage (BAL) or unconcentrated nasal wash samples binding to SARS-CoV-2 spike and RBD. ELISA binding titers are expressed as log AUC. FIG. 35E. Mucosal antibody blocking activities in the lower respiratory tracts after the 3rd immunization. ELISA for 10× concentrated BAL or unconcentrated nasal wash samples blocking ACE2, DH1041 and DH1047 binding to SARS-CoV-2 spike protein were performed, and percentages of blocking of ACE or the indicated antibody were shown. Statistical significance in all the panels were determined using Wilcoxon rank sum exact test. Asterisks show the statistical significance: ns, not significant, *P<0.05.

[0119] FIG. 36A-F. RBD-scNP, NTD-scNP and S2P-scNP induced spike-specific binding antibodies and mediated ADCC. Related to FIG. 32. FIG. 36A. Plasma antibody binding titers. ELISA was performed to test plasma samples binding to SARS-CoV-2 spike, RBD or NTD recombinant proteins, as well as to spike proteins of SARS-CoV, bat coronaviruses RaTG13, RsSHC014, and pangolin coronavirus GX-P4L. ELISA binding titers were are expressed as log area-under-curve (AUC). Dot and error bars indicate mean±SEM of all animals in each group. FIG. 36B-C. Plasma antibody blocking activity after the 3rd immunization. ELISA was performed to test plasma antibodies blocking ACE2, human RBD neutralizing antibodies DH1041 and DH1047, and human NTD neutralizing antibody DH1050.1 binding to SARS-CoV-2 spike protein (b), or plasma samples blocking ACE2, DH1041 and DH1047 binding to RsSHC014 spike protein (c). Data are expressed as percentages of blocking of ACE or the indicated antibody by 1:50 diluted plasma samples. FIG. 36D. Plasma antibodies staining on SARS-CoV-2 spike-transfected 293T cells. Pre-immunization (week 0) and pre-challenge (week 10) samples were tested. FIG. 36E. The gating strategy for the NK cell degranulation ADCC assay. Purified human NK cells were mixed with SARS-CoV-2 spike-transfected cells or SARS-CoV-2 infected cells in the presence of 1:500 diluted plasma samples. NK cell degranulation was detected based on CD107a expression. f. RBD-scNP-, NTD-scNP- and S2P-scNP-induced antibodies mediated ADCC. The percentages of CD107a+NK cells were shown when NK cells were assayed with plasma antibodies (left) or purified IgG (right) in SARS-CoV-2 spike transfected 293T cells (top row) or SARS-CoV-2 infected Vero E6 cells (bottom row). Fab2 fragments were set as a negative control for purified, whole IgG.

[0120] FIG. 37A-G. Antibody responses and T cell responses elicited by scNP vaccines as a booster vaccination in macaques that received two doses of S-2P mRNA-LNP vaccine. FIG. 37A. Plasma antibody binding titers. ELISA was performed to test plasma antibodies binding to SARS-CoV-2 spike, RBD and NTD, as well as spike proteins of SARS-CoV, bat coronaviruses RaTG13, RsSHC014, and pangolin coronavirus GX-P4L. ELISA binding titers were shown by log area-under-curve (AUC). Dot and error bars indicate mean±SEM of all animals in each group. FIG. 37B-C. Plasma antibody blocking activity after the 3rd immunization. ELISA was performed to test plasma antibodies blocking ACE2, human RBD neutralizing antibodies DH1041 and DH1047, and human NTD antibody DH1050.1 binding to SARS-CoV-2 spike protein (b), or plasma samples blocking ACE2, DH1041 and DH1047 binding to RsSHC014 spike protein (c). Data are expressed as percentages of blocking of ACE or the indicated antibody by 1:50 diluted plasma samples. FIG. 37D-E. Comparison of mucosal antibody blocking activities induced by 3 doses of scNP vaccination or 2 doses of S2P mRNA-LNP+1 dose of scNP vaccination. ELISA for 10× concentrated bronchoalveolar lavage (BAL) samples (d) and neat nasal wash samples (e) blocking the binding of ACE2 or neutralizing antibody (DH1041 or DH1047) on SARS-CoV-2 spike were performed. Data are expressed as percentages of blocking of ACE or the indicated antibody by mucosal samples. Statistical significance in all the panels were determined using Wilcoxon rank sum exact test. Asterisks show the statistical significance: ns, not significant, *P<0.05. f-g. T cell responses induced by RBD-scNP vaccine or the S2P mRNA-LNP vaccine. FIG. 37F-G. Percentages of cytokine-secreting CD4+(f) or CD8+(g) memory T cells were quantified in monkeys received 2 doses of RBD-scNP immunization, or 2 doses of S-2P mRNA-LNP, or unimmunized controls. The intracellular staining for IFN-γ, IL-2, TNF-α, IL-4 or IL-13 was performed following stimulation with SARS-CoV-2 spike protein peptide pool. Percentages of cytokine-secreting cells were shown for individual monkeys as dots, and for mean values of each vaccine group as bars.

[0121] FIG. 38. Three doses of RBD-scNP immunization induced neutralizing antibodies against SARS-CoV-2 Omicron variant. Plasma antibody (n=5, post-3rd immunization) neutralization titers against pseudoviruses of the SARS-CoV-2 Omicron variants in 293T-ACE2 cells. The geometric mean ID50 and ID80 titers and the fold reduction compared to SARS-CoV-2D614G are shown. Adjuvant is 3M052-5 ug/Alum 500 ug.

[0122] FIG. 39. Two doses of RBD-scNP immunization induced neutralizing antibodies against SARS-CoV-2 Omicron variant. Plasma antibody (n=15, post-2nd immunization) neutralization titers against pseudoviruses of the SARS-CoV-2 Omicron variants in 293T-ACE2 cells. The geometric mean ID50 and ID80 titers and the fold reduction compared to D614G are shown. Adjuvant is 3M052-5 ug/Alum 500 ug.

[0123] FIG. 40. Neutralizing antibodies against SARS-CoV-2 Omicron variant elicited by RBD-scNP vaccine formulated with three different adjuvants. Plasma antibody (post-2nd and post-3rd immunization) neutralization titers against pseudoviruses of the SARS-CoV-2 Omicron variants in 293T-ACE2 cells. The geometric mean ID50 titers and the fold reduction compared to D614G are shown. The dashed arrows indicate fold increase of ID50 titer induced by the 3rd boost. Adjuvants as above the graphs. Antibodies that cross-reacted with SARS-CoV-2 Omicon and neutralized Omicron were more potent and less fold-reduction compared to 614G SARS-CoV-2 were higher when the adjuvant used was 3M052-AF 5 ug. Dose of Alum alone was 500 ug. Dose of 3M052/Alum together was 5 ug and 500 ug respectively.

[0124] FIG. 41. Neutralizing antibodies against SARS-CoV-2 Omicron variant induced by NTD-scNP and S2P-scNP vaccines. NTD-scNP- or S2P-scNP-induced plasma antibody (post-2nd and post-3rd immunization) neutralization titers against pseudoviruses of the SARS-CoV-2 Omicron variants in 293T-ACE2 cells. The geometric mean ID50 titers and the fold reduction compared to D614G are shown. Adjuvant used was 3M052/Alum 5 ug/500 ug respectively.

[0125] FIG. 42. Neutralizing antibodies against SARS-CoV-2 Omicron variant induced by RBD-scNP as a heterologous boost for S2P mRNA-LNP vaccine. Plasma antibody (post-2nd and post-3rd immunization) neutralization titers against pseudoviruses of the SARS-CoV-2 Omicron variants in 293T-ACE2 cells. The geometric mean ID50 titers and the fold reduction compared to D614G are shown. The dashed arrow indicates fold increase of ID50 titer induced by the 3rd boost. Adjuvant used for RBD-scNP was 3M052/Alum 5 ug/500 ug respectively.

[0126] FIG. 43A-B show non-limiting embodiments of nucleic acid (SEQ ID NOS 233-243) (FIG. 43A) and amino acid sequences (SEQ ID NOS 244-253, and 36) (FIG. 43B) of the invention. Amino acid sequences in FIG. 43B include a signal peptide, e.g.

(SEQ ID NO: 23)
MGWSCIILFLVATATGVHA.

### DETAILED DESCRIPTION

[0128] On Mar. 11, 2020, the World Health Organization (WHO) characterized the ongoing spread of COVID-19, a highly contagious respiratory disease caused by the new betacoronavirus SARS-CoV-2 (SARS-2), a pandemic. As the virus continues to spread, there is an urgent need to understand as much as possible, as rapidly as possible, about this new virus.

[0129] The ongoing global pandemic of the new SARS-CoV-2 coronavirus (CoV) presents an urgent need for the development of effective preventative and treatment therapies. The viral-host cell fusion (S) protein spike is a prime target for such therapies owing to its critical role in the virus lifecycle. The spike protein is divided into two regions: the N-terminal S1 domain that caps the C-terminal S2 fusion domain. Binding to host receptor via the Receptor Binding Domain (RBD) in S1 is followed by proteolytic cleavage of the spike by host proteases. Large conformational changes in the S-protein result in S1 shedding and exposure of the fusion machinery in S2. Class I fusion proteins such as the CoV spike protein that undergo large conformational changes during the fusion process must, by necessity, be highly flexible and dynamic. Indeed, cryo-EM structures of the SARS-CoV-2 (SARS-2) spike reveal considerable flexibility and dynamics in the S1 domain, especially around the RBD that exhibits two discrete conformational states—a “down” state that is shielded from receptor binding, and an “up” state that is receptor-accessible. Walls, A. C. et al. Structure, Function, and Antigenicity of the SARS-CoV-2 Spike Glycoprotein. Cell, doi:https://doi.org/10.1016/j.cell.2020.02.058 (2020); Wrapp, D. et al. Cryo-EM structure of the 2019-nCoV spike in the prefusion conformation. Science 367, 1260-1263, doi:10.1126/science.abb2507 (2020).

[0130] The transmembrane SARS-2 spike protein spike trimer mediates attachment and fusion of the viral membrane with the host cell membrane and is therefore critical for the viral life cycle. Displayed on the surface of the virus, the spike protein is a prime target for vaccine and therapeutics design.

[0131] The SARS-2 spike protein displays striking structural similarities with the S proteins of the previously identified SARS-CoV, MERS-CoV, and other human and murine CoV viruses. However, most S-targeting antibodies to SARS and MERS do not cross-react with SARS-2. Conformational evasion is among the many host immune evasion tools available to viruses. Dramatic shifts in the conformational ensemble of states for CoVs have in fact been demonstrated.

[0132] In certain aspects the invention provides modified coronavirus spike proteins designs including but not limited to protein designs comprising spike protein and/or various spike portions/domains from SARS-CoV-2 (SARS-2), SARS-CoV-1 (CoV1), MERS, or any other coronavirus spike protein, wherein in certain embodiments these proteins are designed to form multimeric complexes. The invention provides amino acid and nucleic acid sequences of recombinant coronavirus spike proteins or portions thereof, wherein in certain embodiments these spike proteins or portions/domains are multimerized, and could be used as an antigen to induce an immunogenic response. In some embodiments the antigen comprises any suitable portion from a spike protein. In non-limiting embodiments are portions of the spike protein which comprise epitopes conserved between different coronaviruses. In some embodiments the antigen comprises RBD domain from a spike protein. In some embodiments the antigen comprises NTD domain from a spike protein. In some embodiments the antigen comprises FP domain from a spike protein. The sequence of the spike protein is any suitable sequence coronavirus sequence including without limitation SARS-CoV1, SARS-CoV2, MERS, bat coronavirus, pangolin or other animal coronaviruses. In non-limiting embodiments the spike protein sequences comprise any variation in amino acid sequences, including without limitation Wuhan SARS-CoV2 sequence, UK SARS-CoV2 variant B.1.1.7, South African variant 1.351, US SARS-CoV-2 variants with L452R mutations and Brazilian variant P.1, delta, omicron and omicron variants. Additional SARS-2 spike protein sequences from circulating viruses are found in the GISAID EpiFlu™ Database. These sequences could also be designed with any of the modifications described herein.

[0133] Provided are also nucleic acids, including modified mRNAs which are stable and could be used as antigens to induce an immune response. Provided also are nucleic acids optionally designed as vectors, for example for recombinant expression and/or stable integration, e.g. but not limited, gp160 DNA encoding trimer for stable expression, or VLP incorporation.

[0134] The SARS-2 Spike (S) protein includes the receptor binding domain and is a target for neutralizing antibodies. We have designed recombinant protein and DNA constructs that express SARS-2 coronavirus spike protein (GenBank Accession number: YP_009724390.1), for example, as the full-length, transmembrane spike protein, a truncated version of the spike protein that lacks the c-terminal transmembrane domain and cytoplasmic tail, or various spike domains. The truncated spike protein is secreted from expressing cells, whereas the full-length version of the plasmid is expressed on the cell surface. Additional SARS-2 spike protein sequences from circulating viruses are found in the GISAID EpiFlu™ Database. These sequences could also be modified with any of the modifications described herein.

[0135] In non-limiting embodiments, the spike protein designs have several modifications from the wildtype reference sequence from GenBank. First, the SARS-2 protein sequence encodes furin cleavage sites and a cathepsin L cleavage site. The recombinant protein will be made with and without these protease cleavage sites to see if they affect protein quality, yield, and immunogenicity. Second, the natural signal peptide that directs intracellular trafficking of the spike protein will be exchanged for the bovine prolactin signal peptide. The bovine prolactin signal peptide is a strong signal peptide that directs proteins into the secretory pathway. This signal peptide is predicted by the SignalP 5.0 program to be cleaved off of the mature spike protein more efficiently than the natural virus signal peptide sequence. Third, the secreted spike protein should trimerize in order to resemble the native, membrane-bound spike protein on coronavirus virions. However, the truncated, secreted spike protein lacks the transmembrane domain and thus may not form a stable trimeric protein. To facilitate trimerization, we added a trimerization domain to the c-terminus of some truncated S proteins. The trimerization domain can be a 29 amino acid sequence called foldon for T4 bacteriophage fibritin protein (Strelkov S V et al. Biochemistry. 1999; Frank S et al. J Mol Biol. 2001). Fourth, we have encoded de novo cysteines to the protein sequence to create new intramolecular and intermolecular disulfide bonds. The bonds prevent conformational changes within the S protein. Non-limiting examples are represented by Clusters modifications 1-11. Fifth, we have encoded two new prolines in between HR1 and the central helix in the spike protein to stabilize the polypeptide turns in the S2 protein (Pallesen et al. PNAS. 2017). Sixth, we have added an AviTag to the truncated S proteins to facilitate functionalization by streptavidin binding.

[0136] For development as a vaccine immunogen, we have also created multimeric nanoparticles that display coronavirus spike protein or fragments on their surface. The rationale for creating such immunogens is that presenting multiple copies of the immunogen allows for a more avid interaction between the immunogen and naïve B cell receptors during the immune response. Thus, weak affinity interactions between the B cell receptor and immunogen are enhanced due to the multiple interactions that work in concert. Without wishing to be bound by theory, this improved interaction with B cells underlies the improved uptake of multimeric immunogens by B cells. The internalized immunogen is then presented to T cells in the context of MHC molecules. The T cells in turn provide the required costimulatory signals to the B cells to promote B cell maturation. Additionally, the SARS-CoV-2 spike protein has 22 glycosylation sites, which could interact with lectins to facilitate trafficking to secondary lymphoid organs. Multimerization of viral spike glycoproteins improves their interaction with mannose binding lectin, thereby increasing antigen trafficking to sites with abundant immune cells.

[0137] The nanoparticle immunogens are composed of various portions of SARS-CoV-2 spike protein and self-assembling ferritin protein. Any suitable ferritin could be used in the immunogens of the invention. In non-limiting embodiments, the ferritin is derived from Helicobacter pylori. In non-limiting embodiments, the ferritin is insect ferritin. In non-limiting embodiments, each nanoparticle displays 24 copies of the spike protein on its surface. The spike protein is displayed as a soluble Spike trimer that has the transmembrane domain and cytoplasmic tail removed and a foldon trimerization domain added. To focus antibodies to neutralizing targets, the spike protein will be truncated down to only the receptor binding domain (RBD), which is a known target for neutralizing antibodies. Without wishing to be bound by theory, this construct can generate neutralizing antibodies, while not eliciting binding antibodies to other sites that mediate antibody-dependent enhancement of virus infectivity (PMID: 25073113, PMID: 21775467).

[0138] Multimeric complexes presenting of antigens—nanoparticles. Presenting multiple copies of antigens to B cells has been a longstanding approach to improving B cell receptor recognition and antigen uptake (Batista and Neuberger, 2000). The improved recognition of antigen is due to the avid interaction of multiple antigens with multiple B cell receptors on a single B cells, which results in clustering of B cells and stronger cell signaling. Furthermore, multimeric presentation improves antigen binding to mannose binding lectin which promotes antigen trafficking to B cell follicles (Tokatlian et al., 2019). Self-assembling complexes comprising multiple copies of an antigen are one strategy of immunogen design approach for arraying multiple copies of an antigen for recognition by the B cell receptors on B cells (Kanekiyo et al., 2013; Ueda et al., 2020).

[0139] In some instances, the gene of an antigen can be fused via a linker/spacer to a gene of a protein which could self-assemble. Upon translation, a fusion protein is made that can self-assemble into a multimeric complex—also referred to as a nanoparticle displaying multiple copies of the antigen. In other instances, the protein antigen could be conjugated to the self-assembling protein via an enzymatic reaction, thereby forming a nanoparticle displaying multiple copies of the antigen.

[0140] Multivalent/multimeric presentation using ferritin. Ferritin is a well-known protein that self-assembles into a hollow particle composed of repeating subunits. In some species ferritin nanoparticles are composed of 24 copies of a single subunit, whereas in other species it is composed of 12 copies each of two subunits. We chose here the two subunit ferritin nanoparticle from Trichoplusia ni since the viral antigen of choice can be fused to, for example, one or both chains of the ferritin nanoparticle. Thus, by fusing the antigen to only one chain the valency can be 12 individual antigens or by fusing the antigen to both chains the valency can be increased to 24 copies of the antigen. While 24 copies of the antigen may increase the interaction with lectins that enhance antigen trafficking, it can also make the nanoparticle unstable or preclude access to epitopes on the sides of the exogenous antigen because the antigens are too densely clustered on the nanoparticle. In such instances having the ability to form nanoparticles with lower antigen valency because the antigen is fused to only one ferritin chain would be beneficial.

[0141] Structural considerations and ferritin selection in design of nanoparticle. Previous studies have attempted to use ferritin to display complex antigens on their surface. However, the fusion of heterologous proteins to ferritin and the formation of nanoparticles is inconsistent. Often the nanoparticle fails to form or does so inefficiently resulting in low yields. This necessitates many rounds of iterative protein design to find the optimal fusion protein construct. We inspected the structure of Helicobacter pylori ferritin to determine reasons why fusing the gene of a protein of interest to the 5′ end of the ferritin gene might disrupt nanoparticle formation upon translation. Without being bound by theory, several considerations are discussed. First, the N-terminus of Helicobacter pylori ferritin subunits adopt an alpha helix structure. The fusion of the exogenous protein must occur at the point in the sequence where the helix has turned away from the center of the nanoparticle. Therefore, the N-terminus can be truncated to the Asp residue at position 5 since it is the last apical amino acid. Second, the sequence of the heterologous fused protein will have to be compatible with the alpha helix secondary structure. The heterologous fused protein cannot break the alpha helix secondary structure or the ferritin subunit will not properly fold. At the same time, the sequence of heterologous fused protein cannot continue the alpha helix structure or the extended helix will clash with adjacent ferritin chains. To disrupt the alpha helix we have designed long linkers, which could be flanked by prolines (e.g. PGS19 and PGS34) to break the secondary structure of the peptide to which the heterologous protein is attached. In some embodiments, linkers for use in any of the designs of the invention could be 2-50 amino acids long, e.g. 2, 3, 4, 5, 6, 7, 8, 9, 10, 11, 12, 13, 14, 15, 16, 17, 18, 19, 20, 25, 30, 35, 40, 45, or 50 amino acids long. In certain embodiments, these linkers comprise glycine and serine amino acid in any suitable combination, and/or repeating units of combinations of glycine, serine and/or alanine. Third, the tertiary structure of each H. pylori ferritin subunit causes the N-terminal helix to be distal to the three-fold symmetrical axis in the center of the trimeric subunits. Thus, the interaction or clustering of the heterologous antigens requires crossing over top of two or more ferritin subunit alpha helices. The heterologous protein has to attach to the ferritin subunit in such a way that it can turn the peptide chain to the left to cross over top of the helices. Such a redirection of the peptide chain can only happen if the heterologous protein does not continue the alpha helical secondary structure of the N-terminus of H. pylori ferritin.

[0142] Trichoplusia ni (T. ni) ferritin is an alternative sequence to the H. pylori ferritin. T. ni has two ferritin chains whose structures are different from Helicobacter pylori ferritin. In contrast to H. pylori ferritin chains, the two chains of T. ni ferritin have long flexible N-terminal regions. The limited intramolecular interactions of these N-terminus with other ferritin chains allows it to be easily fused to a heterologous protein without disrupting the overall ferritin chain structure or assembly of the particle. Without being bound by theory fusion proteins where an antigen sequence is fused to T. ni ferritin sequence overcomes some of the technical issues when H. pylori ferritin is used.

[0143] Increasing the valency of self-assembling nanoparticles. Encapsulin nanoparticles have 60 or more subunits to which heterologous proteins can attach. This provides an increase of 36 copies of a heterologous antigen of choice compared to ferritin nanoparticles. Encapsulins also have the advantage of being able to encapsulate other proteins inside the nanoparticle (Sutter et al., 2008). Structures of Thermotoga maritima, Myxococcus xanthus, and Pyrococcus furiosus encapsulins have been solved, which allows for determination of the sites of attachment (Gabashvili et al., 2020). The structure of Thermotoga maritima encapsulin showed that it had 60 repeat subunits that comprised one nanoparticle (Sutter et al., 2008). Some encapsulin nanoparticles such as Pdu nanoparticles are composed of three or more subunits making it more complicated to express and form as an intact nanoparticle (Crowley et al., 2010; Havemann et al., 2002). The N-terminus of T. maritima encapsulin points into the lumen of the particle whereas the C-terminus points out away from the nanoparticle. Thus, the C-terminus of Thermotoga maritima encapsulin is the optimal attachment site for a heterologous protein so that the folding of the encapsulin subunit or the assembly of the nanoparticle in not disrupted. The C-terminus is also an optimal site for attachment since it lacks secondary structure and is just a flexible loop pointing away from the nanoparticle. Encapsulin nanoparticles displaying Epstein-Bar virus glycoproteins have been successfully achieved validating their use as a nanoparticle scaffold (Kanekiyo et al., 2015).

[0144] Selection of SARS-CoV-2 antigens. The Spike (S) protein of coronaviruses (CoV) is the main target for neutralizing, protective antibodies (Piccoli et al., 2020). Within the ectodomain of the S protein there are three domains of the SARS-CoV-2 S protein that are known to contain neutralizing epitopes (Piccoli et al., 2020. These three domains are the receptor binding domain (RBD; amino acids 319-541), N-terminal domain (NTD; amino acids 27-292), and S2 domain (begins at amino acid 819 goes until the end of the protein). Thus, these spike domains are suitable immunogens to include coronavirus vaccine eliciting antibody responses. However, there are differences in neutralizing activity for antibodies binding to each of these three sites. The RBD (amino acids 319-541) is the target of most potent neutralizing antibodies identified thus far (Liu et al., 2020; Piccoli et al., 2020). Cross-neutralizing RBD antibodies—antibodies that can neutralize multiple coronaviruses—have been isolated from SARS-CoV-1-infected individuals and shown to protect against multiple coronaviruses (Wec et al., 2020). Thus, RBD subunit vaccines are the primary focus of vaccines aiming to prevent infection against multiple different coronaviruses or potently inhibit a single coronavirus. The second most potent neutralizing antibodies are against the NTD (Li et al., 2021; Liu et al., 2020), and only weakly neutralizing antibodies have been found against the S2 domain (Li et al., 2021). While sequences for SARS-CoV-2 and MERS are provided for these vaccine targets, vaccines using the same design strategy could be made from any coronavirus of interest. In such designs, the RBD, NTD, FP, or spike ectodomain would be fused to a ferritin or encapsulin subunit.

[0145] Rational selection of sites of vulnerability for cross-neutralizing CoV antibodies. While the RBD elicits potent neutralizing antibodies against the matching virus, the RBD sequence varies across different groups of coronaviruses. This variation or unusual antibody characteristics may be the reason that we found only four potent cross-neutralizing antibodies among 463 antibodies we characterized (Li et al., 2021). We compared the amino acid sequence of betacoronaviruses and identified the fusion peptide (FP) within the S2 domain (amino acids 819-1240) as highly conserved across betacoronaviruses. The FP is targeted by neutralizing antibodies against HIV-1 (Kong et al., 2016). Without wishing to be bound by theory, the coronavirus FP could be a neutralizing determinant for CoV as well since both HIV-1 and coronaviruses have type I viral fusion proteins.

[0146] Vaccines to elicit cross-CoV group neutralizing antibodies. Herein, non-limiting embodiments of vaccine immunogens based on ferritin nanoparticles from H. pylori and T. ni that display RBD subunits and the highly conserved FP are described. The RBD includes amino acids 319 to 541, but could also be truncated to 333 and 529 (RBDTRUNC), depending on which construct expresses more highly. In some embodiments, RBD and fusion peptide are derived from SARS-CoV-2 and Middle East respiratory syndrome coronavirus (MERS-CoV). These two coronaviruses were used as representative strains of CoV from group 2b and 2c respectively. However, the vaccine immunogen can be altered to include other CoV sequences such as SARS-CoV-1, SHC014, or HKU3-1. Similarly, variants of individuals CoVs such as 501Y.V2, or any other coronavirus. The RBD and FP will be displayed on a ferritin nanoparticle or an encapsulin nanoparticle to increase the valency of the immunogen as described herein. T. maritima encapsulin was used since its 60-mer nanoparticle consists of only one repeating subunit to which a heterologous protein could be attached. H. pylori ferritin was used for nanoparticle designs given its established safety in humans vaccinated with influenza HA ferritin nanoparticle vaccines. T. ni ferritin was also used in designs since it allows for fusion of viral antigens to, for example, one or both ferritin chains and it has a flexible N-terminus on one of its chains as discussed herein. Flexible glycine-serine linkers were used to connect the C-terminus of the RBD or FP to the N-terminus of individual ferritin chains. Similarly, flexible glycine-serine linkers were used to connect the RBD to the C-terminus of encapsulin subunits. The length of these linkers can be varied to provide sufficient distance away from the individual encapsulin or ferritin subunit. Additionally, the glycine linkers are flanked with two prolines to break secondary structure at the site of fusion to RBDs or nanoparticle subunits.

[0147] For ease of purification the proteins were designed with secretory signal peptides. The signal peptides were selected from a panel of signal peptide sequences based on computational signal peptidase cleavage predictions. The fusion proteins are designed with or without amino acids that bind to various affinity purification resins appended to each subunit. Purification tags include polyhistidine tags and twin strepTagII, but could be other available affinity resin target sequences. To remove the purification from the final protein, the amino acids of the purification tags are preceded by a protease cleavage site for HRV-3C. Clinical vaccine products will not include the purification tags.

[0148] We have fused the FP to the N-terminus of H. pylori ferritin (HV1302136), and expressed nanoparticles displaying 24 copies of the SARS-CoV-2 FP. The nanoparticles were homogenous as determined by analytical Superose6 size exclusion and negative stain electron microscopy. To test the immunogenicity of the FP nanoparticle we immunized BALB/c mice 4 times and assessed binding antibodies to various coronaviruses. Serum IgG bound to human, bat, and pangolin spike proteins. We also examined neutralization against human and bat coronavirus. Three of five serum samples neutralized MERS-CoV.

[0149] Translatability to different vaccine platforms. Nucleic vaccines are an attractive platform since they can be rapidly manufactured and vaccination with them can elicit lasting humoral immunity (Pardi et al., 2018; Saunders et al., 2020). Since nucleic acid vaccines express the protein in vivo the quality of the immunogen is controlled by designing a gene that results in properly-folded protein. Without wishing to be bound by theory, the designs put forward here can fold properly making them suitable for nucleic vaccine platforms such as lipid nanoparticle encapsulated mRNA or DNA electroporation.

[0150] Presentation of antigens as particulates reduces the B cell receptor affinity necessary for signal transduction and expansion (See Batista et al. EMBO J. 2000 Feb. 15; 19(4): 513-520). Displaying multiple copies of the antigen on a particle provides an avidity effect that can overcome the low affinity between the antigen and B cell receptor. The initial B cell receptor specific for pathogens can be low affinity, which precludes vaccines from being able to stimulate and expand B cells of interest. The stronger B cell receptor interaction leads to stronger B cell activation and proliferation. Provided are spike proteins, including but not limited to receptor binding domains, ectodomains, peptides, N-terminal domains as particulate, high-density array on liposomes or other particles, for example but not limited to nanoparticles. See e.g. He et al. Nature Communications 7, Article number: 12041 (2016), doi:10.1038/ncomms12041; Bamrungsap et al. Nanomedicine, 2012, 7 (8), 1253-1271.

[0151] To improve the interaction between the naïve B cell receptor and immunogens, spike designs can be created to wherein the spike is presented on particles, e.g. but not limited to nanoparticle. In some embodiments, a coronavirus spike protein or a portion thereof, e.g. RBD, NTD, or FP, could be fused to ferritin. The spike could originate from any coronavirus for which amino acid sequences are known or can be derived. Ferritin protein self assembles into a small nanoparticle with three fold axis of symmetry. At these axes the spike protein is fused. Therefore, the assembly of the three-fold axis also clusters three spike protomers together to form a spiketrimer. Each ferritin particle has 8 axes which equates to 8 trimers being displayed per particle. See e.g. Sliepen et al. Retrovirology 201512:82, DOI: 10.1186/s12977-015-0210-4.

[0152] Any suitable ferritin sequence could be used. In non-limiting embodiments, ferritin sequences are disclosed in WO/2018/005558. Non-limiting embodiments of ferritin are disclosed in FIG. 18C1-15, and FIG. 23C1-3. In some embodiments, the ferritin sequence comprises N19Q amino acid change.

[0153] Ferritin nanoparticle linkers: The ability to form coronavirus spike ferritin nanoparticles relies on self-assembly of 24 ferritin subunits into a single ferritin nanoparticle. The addition of a ferritin subunit to the C-terminus of coronavirus spike ectodomain, peptides, or other domains may interfere with the ability of the ferritin subunit to fold properly and or associate with other ferritin subunits. When expressed alone ferritin readily forms 24-subunit nanoparticles, however appending it to coronavirus spike has only yielded low titers of nanoparticles if any. Since the ferritin nanoparticle forms in the absence of spike, the spike could be sterically hindering the association of ferritin subunits. Thus, we designed ferritin with elongated glycine-serine linkers to further distance the spike from the ferritin subunit. To make sure that the glycine linker is attached to ferritin at the correct position, we created constructs that attach at second amino acid position or the fifth amino acid position. The first four n-terminal amino acids of natural Helicobacter pylori ferritin are not needed for nanoparticle formation but may be critical for proper folding and oligomerization when appended to spike. Thus, we designed constructs with and without the Leucine, serine, and lysine amino acids following the glycine-serine linker. The goal will be to find a linker length that is suitable for formation of spike nanoparticles when ferritin is appended to most spikes. Any suitable linker between the spike subunit and ferritin could be used, so long as the fusion protein is expressed and the trimer is formed.

[0154] Another approach to multimerize expression constructs uses staphylococcus Sortase A transpeptidase ligation to conjugate inventive spike ectodomain trimers or spike subunits, for e.g. but not limited to cholesterol. Non-limiting embodiments of spike designs for use in Sortase A reaction are shown in FIGS. 19A-B. The trimers can then be embedded into liposomes via the conjugated cholesterol.

[0155] To conjugate the trimer, a C-terminal LPXTG tag (SEQ ID NO: 34) or a N-terminal pentaglycine repeat tag (SEQ ID NO: 35) is added to the spike trimer gene, where X signifies any amino acid, for example Ala, Ser, Glu. Cholesterol is also synthesized with these two tags. Sortase A is then used to covalently bond the tagged spike subunit to the cholesterol.

[0156] The sortase A-tagged spike trimer protein or portion thereof can also be used to conjugate the trimer to other peptides, proteins, or fluorescent labels. In non-limiting embodiments, the sortase A tagged trimers or spike portions are conjugated to ferritin to form nanoparticles.

[0157] The invention provides design of various coronavirus spike protein derivatives wherein the spike comprises a linker which permits addition of a lipid, such as but not limited to cholesterol, or multimerizing protein via a Sortase A reaction. See e.g. Tsukiji, S. and Nagamune, T. (2009), Sortase-Mediated Ligation: A Gift from Gram-Positive Bacteria to Protein Engineering. ChemBioChem, 10: 787-798. doi:10.1002/cbic.200800724; Proft, T. Sortase-mediated protein ligation: an emerging biotechnology tool for protein modification and immobilisation. Biotechnol Lett (2010) 32: 1. doi:10.1007/s10529-009-0116-0; Lena Schmohl, Dirk Schwarzer, Sortase-mediated ligations for the site-specific modification of proteins, Current Opinion in Chemical Biology, Volume 22, October 2014, Pages 122-128, ISSN 1367-5931, dx.doi.org/10.1016/j.cbpa.2014.09.020; Tabata et al. Anticancer Res. 2015 August; 35(8):4411-7; Pritz et al. J Org. Chem. 2007, 72, 3909-3912.

### REFERENCES

[0158] Batista, F. D., and Neuberger, M. S. (2000). B cells extract and present immobilized antigen: implications for affinity discrimination. EMBO J 19, 513-520.
[0159] Crowley, C. S., Cascio, D., Sawaya, M. R., Kopstein, J. S., Bobik, T. A., and Yeates, T. O. (2010). Structural insight into the mechanisms of transport across the Salmonella enterica Pdu microcompartment shell. J Biol Chem 285, 37838-37846.
[0160] Gabashvili, A. N., Chmelyuk, N. S., Efremova, M. V., Malinovskaya, J. A., Semkina, A. S., and Abakumov, M. A. (2020). Encapsulins-Bacterial Protein Nanocompartments: Structure, Properties, and Application. Biomolecules 10.
[0161] Havemann, G. D., Sampson, E. M., and Bobik, T. A. (2002). PduA is a shell protein of polyhedral organelles involved in coenzyme B(12)-dependent degradation of 1,2-propanediol in Salmonella enterica serovar typhimurium LT2. J Bacteriol 184, 1253-1261.
[0162] Kanekiyo, M., Bu, W., Joyce, M. G., Meng, G., Whittle, J. R., Baxa, U., Yamamoto, T., Narpala, S., Todd, J. P., Rao, S. S., et al. (2015). Rational Design of an Epstein-Barr Virus Vaccine Targeting the Receptor-Binding Site. Cell 162, 1090-1100.
[0163] Kanekiyo, M., Wei, C. J., Yassine, H. M., McTamney, P. M., Boyington, J. C., Whittle, J. R., Rao, S. S., Kong, W. P., Wang, L., and Nabel, G. J. (2013). Self-assembling influenza nanoparticle vaccines elicit broadly neutralizing H1N1 antibodies. Nature 499, 102-106.
[0164] Kong, R., Xu, K., Zhou, T., Acharya, P., Lemmin, T., Liu, K., Ozorowski, G., Soto, C., Taft, J. D., Bailer, R. T., et al. (2016). Fusion peptide of HIV-1 as a site of vulnerability to neutralizing antibody. Science 352, 828-833.
[0165] Li, D., Edwards, R. J., Manne, K., Martinez, D. R., Schafer, A., Alam, S. M., Wiehe, K., Lu, X., Parks, R., Sutherland, L. L., et al. (2021). The functions of SARS-CoV-2 neutralizing and infection-enhancing antibodies in vitro and in mice and nonhuman primates. bioRxiv.
[0166] Liu, L., Wang, P., Nair, M. S., Yu, J., Rapp, M., Wang, Q., Luo, Y., Chan, J. F., Sahi, V., Figueroa, A., et al. (2020). Potent neutralizing antibodies against multiple epitopes on SARS-CoV-2 spike. Nature 584, 450-456.
[0167] Pardi, N., Hogan, M. J., Naradikian, M. S., Parkhouse, K., Cain, D. W., Jones, L., Moody, M. A., Verkerke, H. P., Myles, A., Willis, E., et al. (2018). Nucleoside-modified mRNA vaccines induce potent T follicular helper and germinal center B cell responses. J Exp Med 215, 1571-1588.
[0168] Piccoli, L., Park, Y. J., Tortorici, M. A., Czudnochowski, N., Walls, A. C., Beltramello, M., Silacci-Fregni, C., Pinto, D., Rosen, L. E., Bowen, J. E., et al. (2020). Mapping Neutralizing and Immunodominant Sites on the SARS-CoV-2 Spike Receptor-Binding Domain by Structure-Guided High-Resolution Serology. Cell 183, 1024-1042 e1021.
[0169] Saunders, K. O., Pardi, N., Parks, R., Santra, S., Mu, Z., Sutherland, L., Scearce, R., Barr, M., Eaton, A., Hernandez, G., et al. (2020). Lipid nanoparticle encapsulated nucleoside-modified mRNA vaccines elicit polyfunctional HIV-1 antibodies comparable to proteins in nonhuman primates. bioRxiv.
[0170] Sutter, M., Boehringer, D., Gutmann, S., Gunther, S., Prangishvili, D., Loessner, M. J., Stetter, K. O., Weber-Ban, E., and Ban, N. (2008). Structural basis of enzyme encapsulation into a bacterial nanocompartment. Nat Struct Mol Biol 15, 939-947.
[0171] Tokatlian, T., Read, B. J., Jones, C. A., Kulp, D. W., Menis, S., Chang, J. Y. H., Steichen, J. M., Kumari, S., Allen, J. D., Dane, E. L., et al. (2019). Innate immune recognition of glycans targets HIV nanoparticle immunogens to germinal centers. Science 363, 649-654.
[0172] Ueda, G., Antanasijevic, A., Fallas, J. A., Sheffler, W., Copps, J., Ellis, D., Hutchinson, G. B., Moyer, A., Yasmeen, A., Tsybovsky, Y., et al. (2020). Tailored design of protein nanoparticle scaffolds for multivalent presentation of viral glycoprotein antigens. Elife 9.
[0173] Wec, A. Z., Wrapp, D., Herbert, A. S., Maurer, D. P., Haslwanter, D., Sakharkar, M., Jangra, R. K., Dieterle, M. E., Lilov, A., Huang, D., et al. (2020). Broad neutralization of SARS-related viruses by human monoclonal antibodies. Science 369, 731-736.

[0174] Using the protein designs described herein which are based on SARS-CoV-2 spike sequence, a skilled artisan can readily make protein designs from any other coronavirus.

### Nucleic Acid Sequences

[0175] In certain aspects, the invention provides nucleic acids comprising sequences encoding proteins of the invention. In certain embodiments, the nucleic acids are DNAs. In certain embodiments, the nucleic acids are mRNAs. In certain aspects, the invention provides expression vectors comprising the nucleic acids of the invention.

[0176] In certain aspects, the invention provides a pharmaceutical composition comprising mRNAs encoding the inventive antibodies. In certain embodiments, these are optionally formulated in lipid nanoparticles (LNPs). In certain embodiments, the mRNAs are modified. Modifications include without limitations modified ribonucleotides, poly-A tail, 5′cap.

[0177] In certain aspects the invention provides nucleic acids encoding the inventive protein designs. In non-limiting embodiments, the nucleic acids are mRNA, modified or unmodified, suitable for use any use, e.g. but not limited to use as pharmaceutical compositions. In certain embodiments, the nucleic acids are formulated in lipid, such as but not limited to LNPs.

[0178] In some embodiments the antibodies are administered as nucleic acids, including but not limited to mRNAs which could be modified and/or unmodified. See US Pub 20180028645A1, US Pub 20170369532, US Pub 20090286852, US Pub 20130111615, US Pub 20130197068, US Pub 20130261172, US Pub 20150038558, US Pub 20160032316, US Pub 20170043037, US Pub 20170327842, US Pub 20180344838A1 at least at paragraphs [0260]-[0281] for non-limiting embodiments of chemical modifications, wherein each content is incorporated by reference in its entirety. In non-limiting embodiments, a modified mRNA comprises pseudouridine. In some embodiments, the modified mRNA comprises 1-methyl-pseudouridine.

[0179] mRNAs delivered in LNP formulations have advantages over non-LNPs formulations. See US Pub 20180028645A1.

[0180] In certain embodiments the nucleic acid encoding a protein is operably linked to a promoter inserted an expression vector. In certain aspects the compositions comprise a suitable carrier. In certain aspects the compositions comprise a suitable adjuvant.

[0181] In certain aspects the invention provides an expression vector comprising any of the nucleic acid sequences of the invention, wherein the nucleic acid is operably linked to a promoter. In certain aspects the invention provides an expression vector comprising a nucleic acid sequence encoding any of the polypeptides of the invention, wherein the nucleic acid is operably linked to a promoter. In certain embodiments, the nucleic acids are codon optimized for expression in a mammalian cell, in vivo or in vitro. In certain aspects the invention provides nucleic acids comprising any one of the nucleic acid sequences of invention. In certain aspects the invention provides nucleic acids consisting essentially of any one of the nucleic acid sequences of invention. In certain aspects the invention provides nucleic acids consisting of any one of the nucleic acid sequences of invention. In certain embodiments the nucleic acid of the invention, is operably linked to a promoter and is inserted in an expression vector. In certain aspects the invention provides an immunogenic composition comprising the expression vector.

[0182] In certain aspects the invention provides a composition comprising at least one of the nucleic acid sequences of the invention. In certain aspects the invention provides a composition comprising any one of the nucleic acid sequences of invention. In certain aspects the invention provides a composition comprising at least one nucleic acid sequence encoding any one of the polypeptides of the invention.

[0183] In one embodiment, the nucleic acid is an RNA molecule. In one embodiment, the RNA molecule is transcribed from a DNA sequence described herein. In some embodiments, the RNA molecule is encoded by one of the inventive sequences. In another embodiment, the nucleotide sequence comprises an RNA sequence transcribed by a DNA sequence encoding the polypeptide sequences described herein, or a variant thereof or a fragment thereof. Accordingly, in one embodiment, the invention provides an RNA molecule encoding one or more of inventive antibodies. The RNA may be plus-stranded. Accordingly, in some embodiments, the RNA molecule can be translated by cells without needing any intervening replication steps such as reverse transcription.

[0184] In some embodiments, a RNA molecule of the invention may have a 5′ cap (e.g. but not limited to a 7-methylguanosine, 7mG(5′)ppp(5′)NlmpNp). This cap can enhance in vivo translation of the RNA. The 5′ nucleotide of an RNA molecule useful with the invention may have a 5′ triphosphate group. In a capped RNA this may be linked to a 7-methylguanosine via a 5′-to-5′ bridge. An RNA molecule may have a 3′ poly-A tail. It may also include a poly-A polymerase recognition sequence (e.g. AAUAAA) near its 3′ end. In some embodiments, an RNA molecule useful with the invention may be single-stranded. In some embodiments, an RNA molecule useful with the invention may comprise synthetic RNA.

[0185] The recombinant nucleic acid sequence can be an optimized nucleic acid sequence. Such optimization can increase or alter the immunogenicity of the protein. Optimization can also improve transcription and/or translation. Optimization can include one or more of the following: low GC content leader sequence to increase transcription; mRNA stability and codon optimization; addition of a kozak sequence (e.g., GCC ACC) for increased translation; addition of an immunoglobulin (Ig) leader sequence encoding a signal peptide; and eliminating to the extent possible cis-acting sequence motifs (i.e., internal TATA boxes).

[0186] Methods for in vitro transfection of mRNA and detection of protein expression are known in the art.

[0187] Methods for expression and immunogenicity determination of nucleic acid encoded proteins are known in the art.

[0188] A non-limiting embodiment of a neutralization assay is described in Zhao, G., Du, L., Ma, C. et al. A safe and convenient pseudovirus-based inhibition assay to detect neutralizing antibodies and screen for viral entry inhibitors against the new human coronavirus MERS-CoV. Virol J 10, 266 (2013). https://doi.org/10.1186/1743-422X-10-266, which content is incorporated by reference in its entirety. This assay could be adapted for use for SARS CoV-2.

[0189] Non-limiting embodiments of determining antibody responses are described in the following publication: “SARS-CoV-2 specific antibody responses in COVID-19 patients” Okba et al. https://doi.org/10.1101/2020.03.18.20038059. See also US Patent Publication 20200061185 which is incorporated by reference in its entirety.

[0190] Non-limiting embodiments of various assays, reagents, and technologies for evaluating the immunogens of the invention are described in Muthumani et al. Science Translational Medicine 19 Aug. 2015: Vol. 7, Issue 301, pp. 301ra132, DOI: 10.1126/scitranslmed.aac7462. The assays, reagents, and techniques could be adapted for use for SARS CoV-2.

[0191] Recombinant protein production of coronavirus is known. See e.g. in US Patent Pub 20200061185 which disclosure is incorporated by reference in its entirety.

[0192] In some embodiments the SARS-2 S proteins of the invention are in a trimeric configuration. These designs could comprise any suitable trimerization domain.

[0193] Non-limiting examples of exogenous multimerization domains that promote stable trimers of soluble recombinant proteins include: the GCN4 leucine zipper (Harbury et al. 1993 Science 262:1401-1407), the trimerization motif from the lung surfactant protein (Hoppe et al. 1994 FEBS Lett 344:191-195), collagen (McAlinden et al. 2003 J Biol Chem 278:42200-42207), and the phage T4 fibritin Foldon (Miroshnikov et al. 1998 Protein Eng 11:329-414), any of which can be linked to a recombinant coronavirus S ectodomain described herein (e.g., by linkage to the C-terminus of S2) to promote trimerization of the recombinant coronavirus S ectodomain.

[0194] In some examples, the C-terminus of the S2 subunit of the S ectodomain can be linked to a T4 fibritin Foldon domain. In specific examples, the T4 fibritin Foldon domain can include the amino acid sequence GYIPEAPRDGQAYVRKDGEWVLLSTF (SEQ ID NO: 15), which adopts a .beta.-propeller conformation, and can fold and trimerize in an autonomous way (Tao et al. 1997 Structure 5:789-798). Optionally, the heterologous trimerization is connected to the recombinant coronavirus S ectodomain via a peptide linker, such as an amino acid linker. Non-limiting examples of peptide linkers that can be used include glycine, serine, and glycine-serine linkers.

[0195] In some embodiments, the SARS-2 spike ectodomain trimer can be membrane anchored, for example, for embodiments where the coronavirus S ectodomain trimer is expressed on an attenuated viral vaccine, or a virus like particle. In such embodiments, the protomers in the trimer can each comprise a C-terminal linkage to a transmembrane domain, such as the transmembrane domain (and optionally the cytosolic tail) of corresponding coronavirus. For example, the protomers of a disclosed SARS-2 ectodomain trimer can be linked to a SARS-2 S transmembrane and cytosolic tail. In some embodiments, one or more peptide linkers (such as a gly-ser linker, for example, a 10 amino acid glycine-serine peptide linker can be used to link the recombinant S ectodomain protomer to the transmembrane domain.

[0196] The protomers linked to the transmembrane domain can include any of the modifications provided herein (or combinations thereof) as long as the recombinant coronavirus S ectodomain trimer formed from the protomers linked to the transmembrane domain retains the certain properties (e.g., the coronavirus S prefusion conformation).

[0197] The inventive protein or fragments thereof can be produced using recombinant techniques, or chemically or enzymatically synthesized.

[0198] In some embodiments a protein nanoparticle is provided that includes one or more of the disclosed recombinant SARS-CoV-2 S proteins, including but not limited to SARS-2 S trimers. Non-limiting example of nanoparticles include ferritin nanoparticles, encapsulin nanoparticles, Sulfur Oxygenase Reductase (SOR) nanoparticles, and lumazine synthase nanoparticles, which are comprised of an assembly of monomeric subunits including ferritin proteins, encapsulin proteins, SOR proteins, and lumazine synthase, respectively. Additional protein nanoparticle structures are described by Heinze et al., J Phys Chem B., 120(26):5945-52, 2016; Hsia et al., Nature, 535(7610):136-9, 2016; and King et al., Nature, 510(7503):103-8, 2014; each of which is incorporated by reference herein. To construct such protein nanoparticles a protomer of the SARS-2 coronavirus S ectodomain trimer can be linked to a subunit of the protein nanoparticle (such as a ferritin protein, an encapsulin protein, a SOR protein, or a lumazine synthase protein) and expressed in cells under appropriate conditions. The fusion protein self-assembles into a nanoparticle any can be purified.

[0199] In some embodiments, a protomer of a disclosed recombinant SARS-CoV-2 spike protein ectodomain trimer can be linked to a ferritin subunit to construct a ferritin nanoparticle. Ferritin nanoparticles and their use for immunization purposes (e.g., for immunization against influenza antigens) have been disclosed in the art (see, e.g., Kanekiyo et al., Nature, 499:102-106, 2013, incorporated by reference herein in its entirety). Ferritin is a globular protein that is found in all animals, bacteria, and plants, and which acts primarily to control the rate and location of polynuclear Fe(III).sub.2O.sub.3 formation through the transportation of hydrated iron ions and protons to and from a mineralized core. The globular form of the ferritin nanoparticle is made up of monomeric subunits, which are polypeptides having a molecule weight of approximately 17-20 kDa.

[0200] Following production, these monomeric subunit proteins self-assemble into the globular ferritin protein. Thus, the globular form of ferritin comprises 24 monomeric, subunit proteins, and has a capsid-like structure having 432 symmetry. Methods of constructing ferritin nanoparticles are known to the person of ordinary skill in the art and are further described herein (see, e.g., Zhang, Int. J. Mol. Sci., 12:5406-5421, 2011, which is incorporated herein by reference in its entirety).

[0201] In non-specific examples, the ferritin polypeptide is E. coli ferritin, Helicobacter pylori ferritin, insect ferritin, human light chain ferritin, bullfrog ferritin or a hybrid thereof, such as E. coli-human hybrid ferritin, E. coli-bullfrog hybrid ferritin, or human-bullfrog hybrid ferritin. Exemplary amino acid sequences of ferritin polypeptides and nucleic acid sequences encoding ferritin polypeptides for use to make a ferritin nanoparticle including a recombinant SARS-2 spike protein can be found in GENBANK, for example at accession numbers ZP 03085328, ZP 06990637, EJB64322.1, AAA35832, NP 000137 AAA49532, AAA49525, AAA49524 and AAA49523, which are specifically incorporated by reference herein in their entirety. In some embodiments, a recombinant protein of the invention can be linked to a ferritin subunit to form a nanoparticle.

[0202] Polynucleotides encoding a protomer of any of the disclosed recombinant proteins are also provided. These polynucleotides include DNA, cDNA and RNA sequences which encode the protomer, as well as vectors including the DNA, cDNA and RNA sequences, such as a DNA or RNA vector used for immunization. The genetic code to construct a variety of functionally equivalent nucleic acids, such as nucleic acids which differ in sequence but which encode the same protein sequence, or encode a conjugate or fusion protein including the nucleic acid sequence.

[0203] In several embodiments, the nucleic acid molecule encodes a precursor of the protomer, that, when expressed in an appropriate cell, is processed into a recombinant SARS-2 S protomer that can self-assemble into the corresponding recombinant trimer. For example, the nucleic acid molecule can encode a recombinant SARS-2 S ectodomain including a N-terminal signal sequence for entry into the cellular secretory system that is proteolytically cleaved in the during processing of the recombinant protein in the cell. Embodiments further comprise recombinant proteins with different signal peptide sequences.

[0204] In some embodiments, the nucleic acid molecule encodes a precursor S polypeptide that, when expressed in an appropriate cell, is processed into a recombinant SARS-2 S protomer including S1 and S2 polypeptides, wherein the recombinant protein includes any of the appropriate modifications described herein, and optionally can be linked to a trimerization domain, such as a T4 Fibritin trimerization domain.

[0205] Exemplary nucleic acids can be prepared by molecular and cloning techniques. A wide variety of cloning methods, host cells, and in vitro amplification methodologies are well known to persons of skill, and can be used to make the nucleic acids and proteins of the invention.

[0206] The polynucleotides encoding a disclosed recombinant protomer can include a recombinant DNA which is incorporated into a vector (such as an expression vector) into an autonomously replicating plasmid or virus or into the genomic DNA of a prokaryote or eukaryote, or which exists as a separate molecule (such as a cDNA) independent of other sequences. The nucleotides can be ribonucleotides, deoxyribonucleotides, or modified forms of nucleotides. The term includes single and double stranded forms of DNA.

[0207] Polynucleotide sequences encoding a disclosed recombinant protomer can be operatively linked to expression control sequences. An expression control sequence operatively linked to a coding sequence is ligated such that expression of the coding sequence is achieved under conditions compatible with the expression control sequences. The expression control sequences include, but are not limited to, appropriate promoters, enhancers, transcription terminators, a start codon (i.e., ATG) in front of a protein-encoding gene, splicing signal for introns, maintenance of the correct reading frame of that gene to permit proper translation of mRNA, and stop codons.

[0208] DNA sequences encoding the disclosed recombinant protomer can be expressed in vitro by DNA transfer into a suitable host cell. The cell may be prokaryotic or eukaryotic. The term also includes any progeny of the subject host cell. All progeny may not be identical to the parental cell since there may be mutations that occur during replication. Methods of stable transfer, meaning that the foreign DNA is continuously maintained in the host, are known in the art.

[0209] Host systems for recombinant production can include microbial, yeast, insect and mammalian organisms. Methods of expressing DNA sequences having eukaryotic or viral sequences in prokaryotes are well known in the art. Non-limiting examples of suitable host cells include bacteria, archea, insect, fungi (for example, yeast), plant, and animal cells (for example, mammalian cells, such as human). Exemplary cells of use include Escherichia coli, Bacillus subtilis, Saccharomyces cerevisiae, Salmonella typhimurium, SF9 cells, C129 cells, 293 cells, Neurospora, and immortalized mammalian myeloid and lymphoid cell lines. Techniques for the propagation of mammalian cells in culture are well-known (see, e.g., Helgason and Miller (Eds.), 2012, Basic Cell Culture Protocols (Methods in Molecular Biology), 4.sup.th Ed., Humana Press). Examples of mammalian host cell lines are VERO and HeLa cells, CHO cells, and WI38, BHK, and COS cell lines, although cell lines may be used, such as cells designed to provide higher expression, desirable glycosylation patterns, or other features. In some embodiments, the host cells include HEK293 cells or derivatives thereof, such as GnTI.sup.−/− cells, or HEK-293F cells.

[0210] In some embodiments, the disclosed recombinant coronavirus S ectodomain protomer can be expressed in cells under conditions where the recombinant coronavirus S ectodomain protomer can self-assemble into trimers which are secreted from the cells into the cell media. In such embodiments, each recombinant coronavirus S ectodomain protomer contains a leader sequence (signal peptide) that causes the protein to enter the secretory system, where the signal peptide is cleaved and the protomers form a trimer, before being secreted in the cell media. The medium can be centrifuged and recombinant coronavirus S ectodomain trimer purified from the supernatant.

[0211] A nucleic acid molecule encoding a protomer can be included in a viral vector, for example, for expression of the immunogen in a host cell, or for immunization of a subject as disclosed herein. In some embodiments, the viral vectors are administered to a subject as part of a prime-boost vaccination. In several embodiments, the viral vectors are included in a vaccine, such as a primer vaccine or a booster vaccine for use in a prime-boost vaccination.

[0212] In several examples, the viral vector can be replication-competent. For example, the viral vector can have a mutation in the viral genome that does not inhibit viral replication in host cells. The viral vector also can be conditionally replication-competent. In other examples, the viral vector is replication-deficient in host cells.

[0213] A number of viral vectors have been constructed, that can be used to express the disclosed antigens, including polyoma, i.e., SV40 (Madzak et al., 1992, J. Gen. Virol., 73:15331536), adenovirus (Berkner, 1992, Cur. Top. Microbiol. Immunol., 158:39-6; Berliner et al., 1988, Bio Techniques, 6:616-629; Gorziglia et al., 1992, J. Virol., 66:4407-4412; Quantin et al., 1992, Proc. Natl. Acad. Sci. USA, 89:2581-2584; Rosenfeld et al., 1992, Cell, 68:143-155; Wilkinson et al., 1992, Nucl. Acids Res., 20:2233-2239; Stratford-Perricaudet et al., 1990, Hum. Gene Ther., 1:241-256), vaccinia virus (Mackett et al., 1992, Biotechnology, 24:495-499), adeno-associated virus (Muzyczka, 1992, Curr. Top. Microbiol. Immunol., 158:91-123; On et al., 1990, Gene, 89:279-282), herpes viruses including HSV and EBV (Margolskee, 1992, Curr. Top. Microbiol. Immunol., 158:67-90; Johnson et al., 1992, J. Virol., 66:29522965; Fink et al., 1992, Hum. Gene Ther. 3:11-19; Breakfield et al., 1987, Mol. Neurobiol., 1:337-371; Fresse et al., 1990, Biochem. Pharmacol., 40:2189-2199), Sindbis viruses (H. Herweijer et al., 1995, Human Gene Therapy 6:1161-1167; U.S. Pat. Nos. 5,091,309 and 5,2217,879), alphaviruses (S. Schlesinger, 1993, Trends Biotechnol. 11:18-22; I. Frolov et al., 1996, Proc. Natl. Acad. Sci. USA 93:11371-11377) and retroviruses of avian (Brandyopadhyay et al., 1984, Mol. Cell Biol., 4:749-754; Petropouplos et al., 1992, J. Virol., 66:3391-3397), murine (Miller, 1992, Curr. Top. Microbiol. Immunol., 158:1-24; Miller et al., 1985, Mol. Cell Biol., 5:431-437; Sorge et al., 1984, Mol. Cell Biol., 4:1730-1737; Mann et al., 1985, J. Virol., 54:401-407), and human origin (Page et al., 1990, J. Virol., 64:5370-5276; Buchschalcher et al., 1992, J. Virol., 66:2731-2739). Baculovirus (Autographa californica multinuclear polyhedrosis virus; AcMNPV) vectors are also known in the art, and may be obtained from commercial sources (such as PharMingen, San Diego, Calif; Protein Sciences Corp., Meriden, Conn.; Stratagene, La Jolla, Calif).

[0214] In several embodiments, the viral vector can include an adenoviral vector that expresses a protomer of the invention. Adenovirus from various origins, subtypes, or mixture of subtypes can be used as the source of the viral genome for the adenoviral vector. Non-human adenovirus (e.g., simian, chimpanzee, gorilla, avian, canine, ovine, or bovine adenoviruses) can be used to generate the adenoviral vector. For example, a simian adenovirus can be used as the source of the viral genome of the adenoviral vector. A simian adenovirus can be of serotype 1, 3, 7, 11, 16, 18, 19, 20, 27, 33, 38, 39, 48, 49, 50, or any other simian adenoviral serotype. A simian adenovirus can be referred to by using any suitable abbreviation known in the art, such as, for example, SV, SAdV, SAV or sAV. In some examples, a simian adenoviral vector is a simian adenoviral vector of serotype 3, 7, 11, 16, 18, 19, 20, 27, 33, 38, or 39. In one example, a chimpanzee serotype C Ad3 vector is used (see, e.g., Peruzzi et al., Vaccine, 27:1293-1300, 2009). Human adenovirus can be used as the source of the viral genome for the adenoviral vector. Human adenovirus can be of various subgroups or serotypes. For instance, an adenovirus can be of subgroup A (e.g., serotypes 12, 18, and 31), subgroup B (e.g., serotypes 3, 7, 11, 14, 16, 21, 34, 35, and 50), subgroup C (e.g., serotypes 1, 2, 5, and 6), subgroup D (e.g., serotypes 8, 9, 10, 13, 15, 17, 19, 20, 22, 23, 24, 25, 26, 27, 28, 29, 30, 32, 33, 36-39, and 42-48), subgroup E (e.g., serotype 4), subgroup F (e.g., serotypes 40 and 41), an unclassified serogroup (e.g., serotypes 49 and 51), or any other adenoviral serotype. The person of ordinary skill in the art is familiar with replication competent and deficient adenoviral vectors (including singly and multiply replication deficient adenoviral vectors). Examples of replication-deficient adenoviral vectors, including multiply replication-deficient adenoviral vectors, are disclosed in U.S. Pat. Nos. 5,837,511; 5,851,806; 5,994,106; 6,127,175; 6,482,616; and 7,195,896, and International Patent Application Nos. WO 94/28152, WO 95/02697, WO 95/16772, WO 95/34671, WO 96/22378, WO 97/12986, WO 97/21826, and WO 03/02231 1.

[0215] In some embodiments, a virus-like particle (VLP) is provided that comprises a recombinant protomer of the invention. In some embodiments, a virus-like particle (VLP) is provided that includes a recombinant trimer of the invention. Such VLPs can include a recombinant coronavirus S ectodomain trimer that is membrane anchored by a C-terminal transmembrane domain, for example the recombinant coronavirus S ectodomain protomers in the trimer each can be linked to a transmembrane domain and cytosolic tail from the corresponding coronavirus. VLPs lack the viral components that are required for virus replication and thus represent a highly attenuated, replication-incompetent form of a virus. However, the VLP can display a polypeptide (e.g., a recombinant coronavirus S ectodomain trimer) that is analogous to that expressed on infectious virus particles and can eliciting an immune response to the corresponding coronavirus when administered to a subject. Virus like particles and methods of their production are known and familiar to the person of ordinary skill in the art, and viral proteins from several viruses are known to form VLPs, including human papillomavirus, HIV (Kang et al., Biol. Chem. 380: 353-64 (1999)), Semliki-Forest virus (Notka et al., Biol. Chem. 380: 341-52 (1999)), human polyomavirus (Goldmann et al., J. Virol. 73: 4465-9 (1999)), rotavirus (Jiang et al., Vaccine 17: 1005-13 (1999)), parvovirus (Casal, Biotechnology and Applied Biochemistry, Vol 29, Part 2, pp 141-150 (1999)), canine parvovirus (Hurtado et al., J. Virol. 70: 5422-9 (1996)), hepatitis E virus (Li et al., J. Virol. 71: 7207-13 (1997)), and Newcastle disease virus. The formation of such VLPs can be detected by any suitable technique. Examples of suitable techniques known in the art for detection of VLPs in a medium include, e.g., electron microscopy techniques, dynamic light scattering (DLS), selective chromatographic separation (e.g., ion exchange, hydrophobic interaction, and/or size exclusion chromatographic separation of the VLPs) and density gradient centrifugation.

[0216] The immunogens of the invention could be combined with any suitable adjuvant.

[0217] Non-limiting examples of evaluating the immunogenicity and effectiveness of the immunogens of the invention are shown in US Patent Pub 20200061185 which disclosure is incorporated by reference in its entirety.

TABLE 1
Non-limiting embodiments of immunogens of the invention. FIG. 18 shows non-limiting embodiments
of amino acid sequences and nucleic acid sequences. Immunogens could be administered as proteins,
nucleic acids, or combination thereof. A skilled artisan can readily determine the bounds of an
RBD, NTD, or FP domain. In some embodiments, the spike sequence is from CoV2 Wuhan variant. In
some embodiments, the spike sequence is from MERS variant. Using the protein designs described
herein which are based on SARS-CoV-2 spike sequence, a skilled artisan can readily make protein
designs from any other coronavirus, including without limitation any variants. A skilled artisan
appreciates that various elements in the sequences depicted in FIG. 18, including without limitation
HRV-3C cleavage site, 8X his tag (SEQ ID NO: 17), and a twin StrepTagII (IBA), are included to
facilitate expression and/or purification and are removed from recombinant proteins used as immunogens
in animal or clinical studies. The sequences herein include c-terminal sortase A donor/tag sequences
to allow for site specific conjugation to multimerzing scaffolds expressing the n-terminal sortase
A acceptor sequence. The donor sequence is a LPXTGG (SEQ ID NO: 32) where the third amino acid
X can vary. In some embodiments the sortase tag comprises additional amino acid so that the sequence
is GSGLPXTGG (SEQ ID NO: 37). In one embodiment X is E. The acceptor sequence is composed of 5
or more glycines (SEQ ID NO: 21) appended to the N-terminus.

| Plasmid ID | Protein Name |
|---|---|
| HV1302313 | MERS_CoV_RBDv2_GSG_cSORTA_3C8HtwST2opt |
| HV1302314 | PCoV_GXP4L_RBD_GSG_cSORTA_3C8HtwST2opt |
| HV1302315 | BatCoV-RsSHC014_RBD_GSG_cSORTA_3C8HtwST2opt |
| HV1302316 | SARS_CoV_GZ02_RBD_GSG_cSORTA_3C8HtwST2opt |
| HV1302317 | MERS_CoV_RBDv2_3C8HtwST2opt (FIG. 18A-12) |
| HV1302318 | MERS_CoV_RBDv3_3C8HtwST2opt (FIG. 18A-13) |
| HV1302319 | MERS_CoV_RBDv4_GSG_cSORTA_n8HtwSTII3C |
| HV1302118 | SARS-CoV-2 RBD SortA_3C8HtS2 |
| HV1302118_E484K | SARS-CoV-2 RBD_E484K SortA_3C8HtS2 |
| HV1302118_K417N | SARS-CoV-2 RBD_K417N SortA_3C8HtS2 |
| HV1302118_N501Y | SARS-CoV-2 RBD_N501Y SortA_3C8HtS2 |
| HV1302118_E484K_K417N_N501Y | SARS-CoV-2 RBD_K417N_E484K_N501Y |
| | SortA_3C8HtS2 |
| HV1302119 | SARS-CoV-2 S-2P-foldon SortA_3C8HtS2 |
| HV1302120 | SARS-COV-2_NTD_c-SORTA_n3C8HTWSTII |
| HV1302346 | KRISP-K004599_HexaProS_cSORTA_3C8HtwST2 |
| HV1302347 | N00347/2020_HexaProS_cSORTA_3C8HtwST2 |
| SEQ ID NO: 97 | spike RBD + linker + Ferritin any |
| | other RBD domain can be inserted |
| | in this fusion protein |
| | any other ferritin sequence can be |
| | used in this fusion protein |
| | an RBD core + linker + Ferritin can |
| | be designed based on SEQ ID NO: 97. |
| HV1302125 | SARS-COV-2_NTD_C-SORTA_c3C8HTWSTII (FIG. 20C) |

[0218] Initial designs of the SARS-CoV-2 receptor binding domain (RBD) were based on the sequence of the virus spike and were not structurally-informed designs. These RBD designs resulted in a protein that included a portion of the S1 subdomain which truncated within beta sheet structure. In practice, in some instances these RBDs were unstable making them difficult to develop as a vaccine. With the solving of the structure of SARS-CoV-2 spike, RBD core protein designs with different boundaries were rationally designed and encompassed only the portion of the spike that is RBD subunit. These truncated RBD core proteins lack the fragment of S1 that stopped in the middle of a beta sheet and caused the protein folding to be less stable. The RBD cores retain their binding to neutralizing RBD antibodies, but lack the extraneous C terminal peptide sequence. See FIGS. 14A and 14B. In FIG. 14A, the two spheres correspond to amino acid positions: Green=amino acid 333 and Red=527. FIG. 14B shows the positions of amino acid 333 and 527 in the RBDscNP sequence of SEQ ID NO: 97—This sequence is HV1302118. The core SARS CoV2 RBD design is HV1302728v2—does not include linker/tag or ferritin. RBD core designs for any other RBD domain could be designed using the SARS CoV2 RBD core sequence and amino acid positions.

TABLE 2
Non-limiting embodiments of immunogens of the invention. FIGS. 20A, 20B, 21, 22A and 22B show
non-limiting embodiments of amino acid sequences and nucleic acid sequences. Immunogens could
be administered as proteins, nucleic acids, or combination thereof. A skilled artisan can
readily determine the bounds of an RBD, NTD, or FP domain. In some embodiments, the spike
sequence is from CoV2 Wuhan variant. In some embodiments, the spike sequence is from MERS
variant. Using the protein designs described herein which are based on SARS-CoV-2 spike sequence,
a skilled artisan can readily make protein designs from any other coronavirus, including
without limitation any variants. A skilled artisan appreciates that various elements in the
sequences depicted in FIG. 20A and 20B, including without limitation HRV-3C cleavage site,
8X his tag (SEQ ID NO: 17), and a twin StrepTagII (IBA), are included to facilitate expression
and/or purification and are removed from recombinant proteins used as immunogens in animal
or clinical studies. Sequences herein include c-terminal sortase A donor/tag sequences to
allow for site specific conjugation to multimerizing scaffolds expressing the n-terminal
sortase A acceptor sequence. The donor sequence is a LPXTGG (SEQ ID NO: 32)where the third
amino acid X can vary. In some embodiments the sortase tag comprises additional amino acid
so that the sequence is GSGLPXTGG (SEQ ID NO: 37). In one embodiment X is E. The acceptor
sequence is composed of 5 or more glycines (SEQ ID NO: 21) appended to the N-terminus.

| Plasmid ID | Protein ID | Coronavirus |
|---|---|---|
| HV1302100 | SARS_CoV1_BJ01_SpikeEcto2P_3C8HtS2 | SARS-CoV1 |
| HV1302101 | SARS_CoV1_GZ02_SpikeEcto2P_3C8HtS2 | SARS-CoV1 |
| HV1302102 | SARS_coronavirus_SZ3_SpikeEcto2P_3C8HtS2 | SARS-CoV1 |
| HV1302103 | SARS_CoV1_Tor2_SpikeEcto2P_3C8HtS2 | SARS-CoV1 |
| HV1302104 | PCoV_GXP2V_SpikeEcto2P_3C8HtS2 | Pangolin CoV |
| | | GXP2 |
| HV1302105 | PCoV_GXP5E_SpikeEcto2P_3C8HtS2 | Pangolin CoV |
| | | GXP5E |
| HV1302106 | PCoV_GXP5L_SpikeEcto2P_3C8HtS2 | Pangolin CoV |
| | | GXP5L |
| HV1302107 | PCoV_GXP1E_SpikeEcto2P_3C8HtS2 | Pangolin CoV |
| | | GXP1E |
| HV1302108 | PCoV_GXP4L_SpikeEcto2P_3C8HtS2 | Pangolin CoV |
| | | GXP4L |
| HV1302109 | BCOV_RsSHC014_SpikeEcto2P_3C8HtS2 | Bat Coronavirus |
| | | RsSHC014 |
| HV1302110 | BCOV_RaTG13_SpikeEcto2P_3C8HtS2 | Bat Coronavirus |
| | | RaTG13 |
| HV1302111 | BCOV_HKU3-1_SpikeEcto2P_3C8HtS2 | Bat Coronavirus |
| | | HKU3-1 |
| HV1302112 | MERS_CoVYP_009047204_SpikeEcto2P_3C8HtS2 | MERS |
| HV1302113 | HCoV_OC43_SpikeEcto2P_3C8HtS2 | Human CoV OC43 |
| HV1302114 | HCoV_HKU1_SpikeEcto2P_3C8HtS2 | Human CoV HKU1 |
| HV1302115 | HCOV_HKU1_5I08_SpikeEcto_3C8HtS2 | Human CoV HKU1 |
| HV1302116 | HCoV_229E_SpikeEcto2P_3C8HtS2 | Human CoV 229E |
| HV1302117 | HCoV_NL63_SpikeEcto2P_3C8HtS2 | Human CoV NL63 |
| HV1302313 | MERS_CoV_RBDv2_GSG_cSORTA_3C8HtwST2opt | MERS |
| HV1302314 | PCoV_GXP4L_RBD_GSG_cSORTA_3C8HtwST2opt | Pangolin CoV |
| | | GXP4L |
| HV1302315 | BatCoV_RsSHC014_RBD_GSG_cSORTA_3C8HtwST2opt | Bat Coronavirus |
| | | RsSHC014 |
| HV1302316 | SARS_CoV_GZ02_RBD_GSG_cSORTA_3C8HtwST2opt | SARS-CoV1 |
| HV1302631 | CCoV-HuPn-2018RBD_cSortA_3C8HTwST2 | Human |
| | | Pneumonia |
| | | Coronavirus |
| HV1302632 | CCoV-HuPn-2018S-2P_cSortA_3C8HTwST2 | Human |
| | | Pneumonia |
| | | Coronavirus |
| HV1302633 | CCoV-HuPn-2018S-6P_cSortA_3C8HTwST2 | Human |
| | | Pneumonia |
| | | Coronavirus |
| HV1302634 | PDCoV_Haiti_0081-4_2014 RBD_cSortA_3C8HTwST2 | Porcine |
| | | Deltacoronavirus |
| HV1302635 | PDCoV_Haiti_0081-4_2014 S-6P_cSortA_3C8HTwST2 | Porcine |
| | | Deltacoronavirus |
| HV1302636 | PDCoV_Haiti_0256-1_2014 RBD_cSortA_3C8HTwST2 | Porcine |
| | | Deltacoronavirus |
| HV1302637 | PDCoV/Haiti/0329-1/2015 S-6P_cSortA_3C8HTwST2 | Porcine |
| | | Deltacoronavirus |
| HV1302638 | PDCoV_Haiti-0256-1_2015 S-6P_cSortA_3C8HTwST2 | Porcine |
| | | Deltacoronavirus |
| HV1302803 | SARS-CoV-2OmicronRBDExtCore_3C-twST2 | SARS-CoV-2 |
| | | variant |
| HV1302804 | SARS-CoV-2OmicronRBDExtCoreKK_3C-twST2 | SARS-CoV-2 |
| | | variant |
| HV1302805 | SARS-CoV-2OmicronRBDCoreExtKKcsorta_3C-twST2 | SARS-CoV-2 |
| | | variant |
| HV1302806 | SARS-CoV-2OmicronRBDCoreExtcsorta_3C-twST2 | SARS-CoV-2 |
| | | variant |
| HV1302728v2 | RBDcore_ext_untagged_v2 (FIG. 21C and 21D) | SARS-CoV-2 |
| | | variant |
| HV1302125 | | |
| | Sequences of below designs are disclosed in | |
| | FIG. 22A (nucleic acids) and 22B (amino acids) | |
| HV1302967 | BA.2RBDcoreExtKK_mVHss_3CST2 | SARS-CoV-2 |
| | | variant |
| HV1302968 | BA.2RBDcoreExtKK_mVHss_3CtwST2 | SARS-CoV-2 |
| | | variant |
| HV1302969 | BA.2RBDcoreExtKK_mVHss_csorta3C-Ctag | SARS-CoV-2 |
| | | variant |
| HV1302970 | BA.2RBDcoreExtKK_mVHss_csorta_3C-H | SARS-CoV-2 |
| | | variant |
| HV1302120 | SARS-COV-2_NTD_c-SORTA_n3C8HTWSTII | SARS-CoV-2 |
| | | variant |
| HV1302125 | SARS-COV-2_NTD_C-SORTA_c3C8HTWSTII | SARS-CoV-2 |
| | | variant |
| HV1302119 | SARS-CoV-2 S-2P-foldon SortA_3C8HtS2 | SARS-CoV-2 |
| | | variant |
| HV1302346 | KRISP-K004599_HexaProS_cSorta_3C8HtwST2 | |
| HV1302347 | N00347/2020_HexaProS_cSorta_3C8HtwST2 | |
| HV1302965 | SARS-CoV-2OmicronRBDCoreExtKK_csorta_3C-H | SARS-CoV-2 |
| | | variant |
| HV1302966 | SARS-CoV-2OmicronRBDCoreExtKK_csorta_3C-Ctag | SARS-CoV-2 |
| | | variant |
| HV1302971 | SARS-CoV-2OmicronRBDCoreExtKK_L452R_csorta_3C-H | SARS-CoV-2 |
| | | variant |
| HV1302972 | SARS-CoV-2OmicronRBDCoreExtKK_R436K_csorta_3C-H | SARS-CoV-2 |
| | | variant |

TABLE 3
Non-limiting embodiments of immunogens of the invention. FIGS.
23A-B show non-limiting embodiments of amino acid sequences
and nucleic acid sequences. Immunogens could be administered
as proteins, nucleic acids, or combination thereof. A skilled
artisan can readily determine the bounds of an RBD, NTD,
or FP domain. In some embodiments, the spike sequence is
from CoV2 Wuhan variant. In some embodiments, the spike sequence
is from MERS variant. Using the protein designs described
herein which are based on SARS-CoV-2 spike sequence, a skilled
artisan can readily make protein designs from any other coronavirus,
including without limitation any variants. A skilled artisan
appreciates that various elements in the sequences depicted
in FIG. 23A and 23B, including without limitation HRV-3C
protease site: LEVLFQGP (SEQ ID NO: 28), StrepTagII purification
tag: SAWSHPQFEK (SEQ ID NO: 33), are included to facilitate
expression and/or purification and are removed from recombinant
proteins used as immunogens in animal or clinical studies.

| ID | Protein name |
|---|---|
| HV1302891 | SARS2RBDcoreExt.3GS11EKR.HPferritin_nST2_mVHss |
| HV1302892 | SARS2RBDcoreExt.3GS11EKR.HPferritin_nST2_bPrIss |
| HV1302893 | SARS1RBDcoreExt.3GS11EKR.HPferritin_nST2_mVHss |
| HV1302894 | SARS1RBDcoreExt.3GS11EKR.HPferritin_nST2_bPrlss |
| HV1302895 | MERSRBD.3GS11EKR.HPferritin_nST2_mVHss |
| HV1302896 | MERSRBD.3GS11EKR.HPferritin_nST2_bPrIss |
| HV1302897 | MERSRBDcore.3GS.TniFerritinHC_nST2_mVHss |
| HV1302898 | MERSRBDcore.3GS.TniFerritinLC_nST2_mVHss |
| HV1302899 | SARS1RBDcoreExt.3GS.TniFerritinHC_nST2_mVHss |
| HV1302900 | SARS1RBDcoreExt.3GS.TniFerritinLC_nST2_mVHss |
| HV1302901 | MERSRBDcore.3GS11EKR.HPferritin_nST2_mVHss |
| HV1302902 | MERSRBDcore.3GS11EKR.HPferritin_nST2_bPrIss |

TABLE 4
Non-limiting embodiments of various linkers

| | |
|---|---|
| C-terminal Linker/sortase tag fused | Linker between spike or |
| to spike or portion thereof before | portion thereof and |
| sortase mediated conjugation | multimerizing protein |
| These are short linkers to allow | (e.g. ferritin) after |
| better access to the sortase A | sortase conjugation |
| acceptor peptide. The design | |
| goal is to extend the sortase A | |
| tag away from the RBD so that it | |
| can connect to the nanoparticle | |
| with sterically hitting the RBD | |
| beside it. | |
| LPXTG(GG) (SEQ ID NO: 38) | LPXTGGGGGGSG (X could be E or S) |
| LPXTGG(G) (SEQ ID NO: 39) | (SEQ ID NO: 41) |
| LPXTGGG (SEQ ID NO: 40) | Or |
| (G) and (GG) are optional | LPXTGGGGG (X could be E or S) |
| | (SEQ ID NO: 42) |
| GSGLPXTG(GG) (SEQ ID NO: 43) | GSGLPXTGGGGG (X could be E or S) |
| GSGLPXTGG(G) (SEQ ID NO: 44) | (SEQ ID NO: 46) |
| GSGLPXTGGG (SEQ ID NO: 45) | |
| (G) and (GG) are optional | |
| Linkers in direct fusions | |
| between spike or portion | |
| thereof and multimerizing | |
| protein (e.g. ferritin) | |
| [GGS](n) (SEQ ID NO: 47) | Embodiment of a flexible linker |
| | Where n = 1, 2, 3, 4, 5, 6-10. |
| EKAAKAEEAAR (SEQ ID NO: 9) | Embodiments of rigid linkers |
| EKAAKAEEAARP(SEQ ID NO: 10) | |
| EKAAKAEEAARPP (SEQ ID NO: 11) | |
| GGSEKAAKAEEAAR(SEQ ID NO: 12) | Embodiments of flexible and |
| GGSEKAAKAEEAARP(SEQ ID NO: 13) | rigid linkers |
| GGSEKAAKAEEAARPP (SEQ ID NO: 14) | |

[0219] Tables 1, 2 and 3 list spike proteins sequences or portions thereof, e.g. RBD or NTD, that can be conjugated or otherwise arrayed on nanoparticles to create multimeric/multivalent immunogens. The sequences encompass spike proteins from animal coronaviruses and human coronaviruses. Together, these spike proteins or portions thereof can be used to elicit broad immune responses against coronaviruses. These coronaviruses include those with pandemic potential and those that are endemic to the human population.

[0220] Table 1, Table 2 and Table 3 list non-limiting examples of immunogens designs from different human or animal coronaviruses with different sequences. These sequence designs are non-limiting examples of spike proteins or portions thereof that can be used in multispecific multimeric complexes and/or in multimeric complexes in multispecific compositions. Multispecific multimeric complexes are also referred to as mosaic nanoparticles. Mosaic sortase conjugate nanoparticles can be made by displaying multiple human or animal coronavirus receptor binding domains on the surface of nanoparticles. Receptor binding domains can include MERS-CoV (HV1302313), SARS-CoV-1 (HV1302316), Canine CoV-HuPn (HV1302631), Bat CoV SHC014 (HV1302315), Pangolin CoV (PCoV) GXP4L (HV1302314), or Porcine CoV Haiti_0081-4_2014 RBD (HV1302634). These RBD scNPs would span alpha, beta, gamma, and delta coronaviruses representing a means to elicit pan-coronavirus neutralizing antibodies.

[0221] An RBDscNP immunogen generated from HV1302118 is shown in FIG. 18C-1.

[0222] Throughout some sequences represented in figures, various elements are annotated, e.g. signal peptide, linkers, and so forth. These annotated sequences are representative and are used as a guide to identify such elements in sequences which are not annotated.

[0223] Sortase conjugated nanoparticles (scNP) are made by conjugating sortase tagged RBDs, spike proteins or other spike protein portions thereof with the multimeric complex, e.g. a ferritin nanoparticle, in a reaction mediated by the enzyme sortase A. Sortase enzyme conjugation reaction conditions are known and could be further optimized. See M. W. Popp, J. M. Antos, H. L. Ploegh, Site-specific protein labeling via sortase-mediated transpeptidation. Curr Protoc Protein Sci Chapter 15, Unit 15.13 (2009); J. M. Antos et al., Site-Specific Protein Labeling via Sortase-Mediated Transpeptidation. Curr Protoc Protein Sci 89, 15.13.11-15.13.19 (2017). Sortase conjugated mosaic nanoparticles are made by mixing equimolar concentrations of the different sortase tagged RBDs, spike proteins or other spike protein portions thereof with the multimeric complex, e.g. a ferritin nanoparticle, in a single reaction mediated by the enzyme sortase A. For example, sortase conjugated mosaic nanoparticles comprising two different RBDs are made by mixing equimolar concentrations, for example without limitation 50 micromolar of each of the two RBDs, of different sortase tagged RBDs with ferritin nanoparticles in a single sortase A reaction. The conjugate nanoparticle is purified away from unconjugated nanoparticle, and/or the unconjugated proteins, e.g. RBDs. The presence of the two RBDs can be determined by sandwich ELISA or equivalent binding assays using antibodies specific for only one of the RBDs. In some embodiments of the scNP approach, the equal representation of the two RBDs on each nanoparticle is not controlled but instead the equivalent amount of each RBD is assessed for the entire population of nanoparticles. In other embodiments, reaction is carried out under conditions suitable for relatively equal incorporation of each RBD in a nanoparticle.

[0224] A multivalent nanoparticle can be formed by two multimerizing components that interact together to form a nanoparticle. In embodiments where the multivalent RBD nanoparticle is be formed by two components that form the nanoparticle, this allows for each of the two RBDs to be genetically fused to a different component of the nanoparticle. For single component nanoparticles, the two RBDs are genetically fused to the same subunit sequence. Upon expression of a two component nanoparticle such as T. ni ferritin the two chains spontaneously form into a nanoparticle with 12 RBD-ferritin heavy chain subunits assembling with 12 RBD-ferritin light chain subunits. When the nanoparticle is composed of a single subunit, the nanoparticle forms with a mixture of subunits fused to each RBD. The presence of the two RBDs can be determined by sandwich ELISA or equivalent binding assays using antibodies specific for only one of the RBDs. In the single component nanoparticle approach, the equal representation of the two RBDs on each nanoparticle is not controlled but instead the equivalent amount of each RBD is assessed for the entire population of nanoparticles. Mass spectrometry is used to verify the presence of all intended RBDs. Relative abundance of each RBD is determined in western blots using an antibody specific for each RBD and in vitro transfections with mRNA-LNPs.

[0225] To make lipid nanoparticle encapsulated-mRNA encoding multispecific RBD nanoparticles-nanoparticles displaying more than one receptor binding domain—an mRNA encoding each RBD fused to a ferritin sequences which forms a nanoparticle is made. The mRNA that encode each RBD ferritin subunit is mixed together and encapsulated in lipid nanoparticles. Since a single cell can take up many mRNA-LNPs it is not necessary to equally load each LNP with equal amounts of the two mRNAs.

[0226] Making mosaic NP versus two or more different specific nanoparticles mixed in the vaccine formulation may provide advantages. Mosaic nanoparticles are reported to give higher neutralizing antibodies than mixing two nanoparticles together. In theory, mosaic nanoparticles bind to the B cell receptor of cross-reactive B cells since such B cells can engage all of the antigens presented on the nanoparticle surface. The crosslinking of more B cell receptors leads to a stronger activation signal for the B cell. The effect was recently reported by Walls et al for coronavirus RBD (Cell. 2021 Oct. 14; 184(21):5432-5447). When the RBDs are not expected to bind to single BCR it is unknown whether mosaic nanoparticles will be better than mixing two NPs together. We will determine the difference in preclinical mouse experiments.

[0227] The following terms have the meanings listed unless otherwise specified. Any undefined terms have their art recognized meanings.

[0228] “Alkyl” can refer to a straight chain or branched, noncyclic or cyclic, unsaturated or saturated aliphatic hydrocarbon containing from 1 to 30 carbon atoms, and in certain embodiments containing from 1 to 25, or 1 to 20, or 1 to 15, or 1 to 12, or 1 to 10, or 1 to 8, or 1 to 6, carbon atoms, unless specified elsewhere herein. Representative saturated straight chain alkyls include methyl, ethyl, n-propyl, n-butyl, n-pentyl, n-hexyl, and the like, including undecyl, dodecyl, tridecyl, tetradecyl, pentadecyl, hexadecyl, heptadecyl, octadecyl, etc.; while saturated branched alkyls include isopropyl, sec-butyl, isobutyl, tert-butyl, isopentyl, and the like, Representative saturated cyclic alkyls include cyclopropyl, cyclobutyl cyclopentyl, cyclohexyl and the like; while unsaturated cyclic alkyls include cyclopentenyl and cyclohexenyl, and the like. Cyclic alkyls are also referred to herein as “homocycles” or “homocyclic rings” Unsaturated alkyls contain at least one double or triple bond between adjacent carbon atoms (referred to as an “alkenyl” or “alkynyl,” respectively). Representative straight chain and branched alkenyls include ethylenyl, propylenyl, 1-butenyl, 2-butenyl, isobutylenyl, 1-pentenyl, 2-pentenyl, 3-methyl-1-butenyl, 2-methyl-2-butenyl, 2,3-dimethyl-2-butenyl, and the like: while representative straight chain and branched alkynyls include acetylenyl, propynyl, 1-butynyl, 2-butynyl, 1-pentynyl, 2-pentynyl, 3-methyl-1-butynyl, and the like.

[0229] “Halo” or “halogen” refers to fluoro, chloro, bromo, and iodo.

[0230] “Hydroxy” or “hydroxyl” refers to the group —OH.

[0231] “Alkoxy” refers to the group —O-alkyl, wherein alkyl is as defined herein.

[0232] Alkoxy includes, by way of example, methoxy, ethoxy, n-propoxy, isopropoxy, n-butoxy, t-butoxy, sec-butoxy, n-pentoxy, and the like.

[0233] “Acylamino” refers to the groups —NR²⁰C(O)R²¹, wherein R²⁰ and R²¹ are independently selected from hydrogen, alkyl, and aryl.

[0234] The term “aryl” refers to a monovalent group that is aromatic and, optionally, carbocyclic. The aryl has at least one aromatic ring. Any additional rings can be unsaturated, partially saturated, saturated, or aromatic. Optionally, the aromatic ring can have one or more additional carbocyclic rings that are fused to the aromatic ring. Unless otherwise indicated, the aryl groups can contain from 6 to 30 carbon atoms. In some embodiments, the aryl groups contain 6 to 20, 6 to 18, 6 to 16, 6 to 12, or 6 to 10, carbon atoms. Examples of an aryl group include phenyl, naphthyl, biphenyl, phenanthryl, and anthracyl.

[0235] The term “comprises” and variations thereof do not have a limiting meaning where these terms appear in the description and claims. Such terms comprise the inclusion of a stated step or element or group of steps or elements but not the exclusion of any other step or element or group of steps or elements. By “consisting of” is meant including, and limited to, whatever follows the phrase “consisting of.” Thus, the phrase “consisting of” indicates that the listed elements are required or mandatory, and that no other elements may be present.

[0236] By “consisting essentially of” is meant including any elements listed after the phrase, and limited to other elements that do not interfere with or contribute to the activity or action specified in the disclosure for the listed elements. Thus, the phrase “consisting essentially of” indicates that the listed elements are required or mandatory, but that other elements are optional and may or may not be present depending upon whether or not they materially affect the activity or action of the listed elements. Any of the elements or combinations of elements that are recited in this specification in open-ended language (e.g., comprise and derivatives thereof), are considered to additionally be recited in closed-ended language (e.g., consist and derivatives thereof) and in partially closed-ended language (e.g., consist essentially, and derivatives thereof).

[0237] The words “preferred” and “preferably” refer to embodiments of the disclosure that may afford certain benefits, under certain circumstances. However, other claims may also be preferred, under the same or other circumstances. Furthermore, the recitation of one or more claims does not imply that other claims are not useful, and is not intended to exclude other claims from the scope of the disclosure.

[0238] Terms such as “a,” “an,” and “the” are not intended to refer to only a singular entity, but include the general class of which a specific example may be used for illustration.

[0239] The terms “a,” “an,” and “the” are used interchangeably with the term “at least one.” The phrases “at least one of” and “comprises at least one of” followed by a list refers to any one of the items in the list and any combination of two or more items in the list.

[0240] The term “or” can be employed in its usual sense including “and/or” unless the content dictates otherwise.

[0241] The term “and/or” can refer to one or all of the listed elements or a combination of any two or more of the listed elements.

[0242] Also herein, all numbers are assumed to be modified by the term “about” and in certain embodiments, preferably, by the term “exactly.” As used herein in connection with a measured quantity, the term “about” refers to that variation in the measured quantity as would be expected by the skilled artisan making the measurement and exercising a level of care commensurate with the objective of the measurement and the precision of the measuring equipment used. Herein, “up to” a number (e.g., up to 50) includes the number (e.g., 50).

[0243] Also herein, the recitations of numerical ranges by endpoints include all numbers subsumed within that range as well as the endpoints (e.g., 1 to 5 includes 1, 1.5, 2, 2.75, 3, 3.80, 4, 5, etc.).

[0244] The term “room temperature” refers to a temperature of 20° C. to 25° C. or 22° C. to 25° C.

[0245] The term “in the range” or “within a range” (and similar statements) includes the endpoints of the stated range.

[0246] Groupings of alternative elements or embodiments disclosed herein are not to be construed as limitations. Each group member may be referred to and claimed individually or in any combination with other members of the group or other elements found therein. Without wishing to be bound by theory, one or more members of a group may be included in, or deleted from, a group for reasons of convenience and/or patentability. When any such inclusion or deletion occurs, the specification is herein deemed to contain the group as modified thus fulfilling the written description of all Markush groups used in the appended claims.

[0247] When a group is present more than once in a formula described herein, each group is “independently” selected, whether specifically stated or not. For example, when more than one Y group is present in a formula, each Y group is independently selected.

[0248] Furthermore, subgroups contained within these groups are also independently selected. For example, when each Y group contains an R, then each R is also independently selected.

[0249] Reference throughout this specification to “one embodiment,” “an embodiment,” “certain embodiments,” or “some embodiments,” etc., can refer to a particular feature, configuration, composition, or characteristic described in connection with the embodiment is included in at least one embodiment of the invention. Thus, the appearances of such phrases in various places throughout this specification are not necessarily referring to the same embodiment of the invention. Furthermore, the particular features, configurations, compositions, or characteristics may be combined in any suitable manner in one or more embodiments.

[0250] The summary of the t disclosure provided herein is not intended to describe each disclosed embodiment or every implementation of the invention. The description more particularly exemplifies illustrative embodiments. In several places throughout the application, guidance is provided through lists of examples, which examples may be used in various combinations. In each instance, the recited list serves only as a representative group and should not be interpreted as an exclusive list. Thus, the scope of the disclosure should not be limited to the specific illustrative structures described herein, but rather extends at least to the structures described by the language of the claims, and the equivalents of those structures. Any of the elements that are positively recited in this specification as alternatives may be explicitly included in the claims or excluded from the claims, in any combination as desired. Although various theories and mechanisms may have been discussed herein, in no event should such discussions serve to limit the claimable subject matter.

[0251] In non-limiting embodiments, compositions can be formulated with appropriate carriers and adjuvants using techniques to yield compositions suitable for immunization. The compositions can include an adjuvant, such as, for example but not limited to alum, 3M052, poly IC, MF-59 or another squalene-based oil-in-water emulsion adjuvant, AS01B, or other liposomal based adjuvant suitable for protein or nucleic acid immunization. In non-limiting embodiments, LNPs are used as adjuvants for immunogenic formulations comprising proteins, including multimeric protein complexes and nanoparticles. In certain embodiments, the adjuvant is GSK AS01E adjuvant containing MPL and QS21. This adjuvant has been shown by GSK to be as potent as the similar adjuvant AS01B but to be less reactogenic. In certain embodiments, AS04, a combination of alum and 3-O-desacyl-4′-monophosphoryl lipid A (MPL) developed by GSK. In certain embodiments the adjuvant is AS03, an oil-in-water emulsion combination adjuvant developed by GSK. Non-limiting embodiments of adjuvants are described in the NIH 2018 Strategic Plan for Research on Vaccine Adjuvants. https://www.niaid.nih.gov/sites/default/files/NIAIDStrategicPlanVaccineAdjuvants2018.pdf

[0252] In certain embodiments, the composition and methods comprise an adjuvant. Non-limiting examples of adjuvants include GLA/SE, alum, Poly I poly C (poly IC), polyIC/long chain (LC) TLR agonists, TLR7/8 and/or 9 agonists (e.g. CpG-oligodeoxynucleotide (oCpG)), or a combination of TLR7/8 and TLR9 agonists (see Moody et al. (2014) J. Virol. March 2014 vol. 88 no. 6 3329-3339), or any other suitable adjuvant. Non-limiting examples of TLR7/8 agonist include TLR7/8 ligands, Gardiquimod, Imiquimod and R848 (resiquimod). A non-limiting embodiment of a combination of TLR7/8 and TLR9 agonist comprises R848 and CpG-oligodeoxynucleotide (oCpG) in STS (see Moody et al. (2014) J. Virol. March 2014 vol. 88 no. 6 3329-3339).

[0253] In certain embodiments, the adjuvant can be Alum (aluminum hydroxide) or variants of Alum such as pSer Alum (Moyer et al. Nat Med 2020 March; 26(3):430-440; doi: 10.1038/s41591-020-0753-3. Epub 2020 Feb. 17.).

[0254] In certain embodiments, TLR agonists are used as adjuvants. In certain embodiments, TLR agonists are TLR7/8 agonist. Non-limiting examples of TLR 7/8 are described in Evans et al. ACS Omega 2019, 4, 13, 15665-15677; Patinote et al. Eur J Med Chem. 2020 May 1; 193: 112238, Miller et al. in Front. Immunol., 10 Mar. 2020| https://doi.org/10.3389/fimmu.2020.00406. In certain embodiments, adjuvants are TLR 4 agonists. Is some embodiments, the adjuvants are saponins. See e.g. WO2019079160A1 and references cited therein. In some embodiments, saponins are natural, synthetic, or semi-synthetic saponins.

[0255] Non-limiting embodiments of adjuvants include without limitation inulin based adjuvants, see e.g. Advax in Petrovsky and Cooper, Vaccine 2015 Nov. 4; 33(44): 5920-5926, Advax+TLR agonists and Advax+CpG, see e.g. Counoupas et al. Sci Rep. 2017; 7: 8582), saponins, Alhydroxiquim (TLR7/8), IMDQ-Dendrimer (TLR7), Polymeric TLR7/8 adjuvants, Mastoparn-7 (M7), adjuvant LT(R192G/L211A) also referred to as dmLT (see e.g. Celemens and Norton, mSphere. 2018 July-August; 3(4): e00215-18).

[0256] In certain embodiment, adjuvants which break immune tolerance are included in the immunogenic compositions (e.g. Verkoczy et al. J Immunol. 2013 Sep. 1; 191(5):2538-50; doi: 10.4049/jimmunol.1300971. Epub 2013 Aug. 5.).

[0257] In non-limiting embodiments, different adjuvants could be combined.

[0258] Other non-limiting embodiments of adjuvants that may be used include without limitation Matrix M (e.g. Gorman et al. in bioRxiv. 2021 Feb. 5:2021.02.05.429759. doi: 10.1101/2021.02.05.429759. Preprint. PMID: 33564763), ALFQ from the Military HIV Research Program (e.g. “Army Liposome Formulation (ALF) family of vaccine adjuvants” Alving C R, Peachman K K, Matyas G R, Rao M, Beck Z. Expert Rev Vaccines. 2020 March; 19(3):279-292. doi: 10.1080/14760584.2020.1745636. Epub 2020 Mar. 31.PMID: 32228108), MF-59 (e.g. Safety and effectiveness of MF-59 adjuvanted influenza vaccines in children and adults. Black S. Vaccine. 2015 Jun. 8; 33 Suppl 2:B3-5. doi: 10.1016/j.vaccine.2014.11.062.PMID: 26022564), GLA-SE or aqueous formulation (e.g. Felber et al. Cell Rep. 2020 May 12; 31(6):107624. doi: 10.1016/j.celrep.2020.107624.PMID: 32402293), CpG 1018 (e.g “Development of CpG-adjuvanted stable prefusion SARS-CoV-2 spike antigen as a subunit vaccine against COVID-19” Kuo T Y, Lin M Y, Coffman R L, Campbell J D, Traquina P, Lin Y J, Liu L T, Cheng J, Wu Y C, Wu C C, Tang W H, Huang C G, Tsao K C, Chen C. Sci Rep. 2020 Nov. 18; 10(1):20085. doi: 10.1038/s41598-020-77077-z.PMID: 33208827), Adjuplex (e.g. “Carbomer-based adjuvant elicits CD8 T-cell immunity by inducing a distinct metabolic state in cross-presenting dendritic cells.” Lee W, Kingstad-Bakke B, Paulson B, Larsen A, Overmyer K, Marinaik C B, Dulli K, Toy R, Vogel G, Mueller K P, Tweed K, Walsh A J, Russell J, Saha K, Reyes L, Skala M C, Sauer J D, Shayakhmetov D M, Coon J, Roy K, Suresh M. PLoS Pathog. 2021 Jan. 14; 17(1):e1009168. doi: 10.1371/joumal.ppat.1009168. eCollection 2021 January PMID: 33444400) and inulin based adjuvants (e.g. “Research Note: The immune enhancement ability of inulin on ptfA gene DNA vaccine of avian Pasteurella multocida.” Gong Q, Peng Y G, Niu M F, Qin C L. Poult Sci. 2020 June; 99(6):3015-3019. doi: 10.1016/j.psj.2020.03.006. Epub 2020 Mar. 24.PMID: 32475437).

[0259] The content of each and every citation is incorporated by reference in its entirety.

### TLR7/8 Agonists

[0260] Provided herein are TLR7/8 agonists that can be used in the compositions described herein. As used herein, a “TLR7/8 agonist” refers to an agonist that affects its biological activities through its interaction with TLR7, TLR8, or both. Such biological activities include, but are not limited to, the induction of TLR7 and/or TLR8 mediated signal transduction to potentiate immune responses via the innate immune system. In some embodiments, the TLR is an imidazoquinoline amine derivative (see. e.g., U.S. Pat. No. 4,689,338 (Gerster)), but other compound classes are known as well (see, e.g., U.S. Pat. No. 5,446,153 (Lindstrom et al.); U.S. Pat. No. 6,194,425 (Gerster et al.); and U.S. Pat. No. 6,110,929 (Gerster et al.); and International Publication Number WO2005/079195 (Hays et al)).

[0261] Such TLR7/8 agonists are hydrophobic or relatively hydrophobic, and in the absence of a helper lipid as described herein. do not substantially form stable aqueous nanosuspensions when mixed with water, such as in the presence or absence of an input from a high energy source. In some embodiments, the TLR7/8 agonists of the disclosure contain nonpolar moieties such as hydrocarbon chains. In some embodiments, the TLR7/8 agonists are soluble in the organic solvents but have low solubility in water, or are insoluble in water. and have a tendency to array into large aggregates in aqueous solutions in the absence of a helper lipid, as described herein. In this context, “insoluble in water” refers to a compound that does not dissolve when the compound is mixed with water, for example, when mixed with water at a temperature of 25° C. to 50° C.; and “low solubility in water” refers to a compound that has a solubility in water of less than 30 mg/mL, for example, when mixed with water at a temperature of 25° C. to 50° C. As used herein. “poorly soluble in water” can be used to refer to compounds, for example, non-polar compounds. that are water insoluble or have low water solubility

[0262] In certain embodiments, the TLR7/8 agonist is a compound of the following structure of Formula (I):

[chemical structure]

or a pharmaceutically acceptable salt thereof, wherein:
[0263] R¹⁰ is selected from the group consisting of hydrogen and C₁₋₆alkyl; and
[0264] R^{11b} is C₁₋₆alkyl optionally substituted with one or more groups selected from the group consisting of halo, hydroxyl, C₁₋₆alkoxy. and acylamino.

[0265] In some embodiments of Formula (I). R¹⁰ is hydrogen. In some embodiments of Formula (I), R¹⁰ is C₁₋₆alkyl. In some embodiments. R¹⁰ is methyl, ethyl, n-propyl, or n-butyl. In some embodiments. R¹⁰ is n-butyl.

[0266] In some embodiments of Formula (I), R^{11b} is C₂₋₄alkyl, which is substituted with acylamino. In some embodiments. R^{11b} is —(CH₂)₄-acylamino. In some embodiments, R^{11b} is —(CH₂)₄—NH—C(O)—C₁₋₂₅alkyl. In some embodiments. R^{11b} is —(CH₂)₄—NH—C(O)—C₁₅₋₂₅alkyl. In some embodiments, R^{11b} is —(CH₂)₄—NH—C(O)—C₁₅₋₂₀alkyl. In some embodiments, R^{11b} is —(CH₂)₄—NH—C(O—C₁₇alkyl.

[0267] In certain embodiments. the TLR7/8 agonist is a compound of the following structure or pharmaceutically acceptable salts thereof:

[chemical structure]

[0268] In certain embodiments. a TLR7/8 agonist used in the compositions herein comprises a N-(4-[4-amino-2-butyl-1H-imidazo[4,5-c]quinolin-1-yl]oxy}butyl)octadecanamide), 3M-052 as described in U.S. Pat. No. 9,242,980 (Wightman).

### Preparation of N-(4-{[4-amino-2-butyl-1H-imidazo[4,5-c]quinolin-1-yl]oxy}butyl)octadecanamide

[chemical structure]

[0270] Unless otherwise noted, all parts, percentages, ratios, etc. in the examples and the rest of the specification are by weight, and all reagents used in the examples were obtained, or are available, from general chemical suppliers such as, for example, Sigma-Aldrich Company, Saint Louis, Missouri, or may be synthesized by conventional methods.

[0271] These abbreviations are used in the following examples: ppm=parts per million; phr=parts per hundred rubber; mL=milliliter; L=liter; g=grams, min=minutes, h=hour, C=degrees Celsius, MPa=megapascals, and N-m=Newton-meter.

### Part A

[0272] A solution of valeric anhydride (6.03 g) and pyridine hydrochloride (0.198 g) in pyridine (8.28 g) was added to a solution of 3-amino-4-chloroquinoline (2.94 g) in pyridine (5.0 g) and the reaction was stirred at room temperature for 16 hours followed by heating at 60° C. for 3 hours. The reaction was concentrated under reduced pressure and sodium carbonate (15 mL of a 10% aqueous solution) was added. The reaction was stirred for 30 minutes and then filtered. The resulting solid was washed with water (60 mL) and dried under vacuum for 4 hours to provide 4.59 g of crude N-(4-chloroquinolin-3-yl)valeramide as brown flakes. The crude product was recrystallized from heptane (10 mL) and the recovered product was further purified by soxhlet extraction using refluxing heptane for 16 hours. The collection flask from the soxhlet extraction apparatus was cooled in a freezer for 2 hours. The resulting solid was collected by filtration and dried under vacuum to yield 2.00 g of N-(4-chloroquinolin-3-yl)valeramide as a white solid.

### Part B

[0273] A solution of 4-amino-1-butanol (7.68 g) and pyridine (7.00 g) in dichloromethane (100 mL) was chilled in an ice bath and a solution of benzylchloroformate (14.37 g) in dichloromethane (100 mL) was slowly added with stirring over a period of thirty minutes. The ice bath was removed and the reaction was stirred for an additional 16 hours. Hydrochloric acid (1.2 M, 200 mL) was added and phases were separated. The organic phase was dried (MgSO₄), filtered and concentrated under reduced pressure. The resulting residue was recrystallized from toluene and dried under vacuum to provide 5.15 g of benzyl (4-hydroxybutyl)carbamate.

[0274] A solution of N-hydroxyphthalimide (3.36 g), benzyl (4-hydroxybutyl)carbamate (4.18 g) and triphenylphosphine (7.41 g) in dichloromethane (100 mL) was chilled in an ice bath and approximately two-thirds of a solution of diisopropylazodicarboxylate (DIAD, 5.68 g) in dichloromethane (50 mL) was slowly added with stirring. The internal temperature of the reaction was monitored and the addition of the DIAD solution was stopped when an exotherm could no longer be detected. The ice bath was removed and the reaction was allowed to warm to room temperature. The reaction was concentrated under reduced pressure and the resulting residue was dissolved in ethanol (200 proof, 100 mL). Hydrazine (1.98 g, 35% in water) was added and the reaction was stirred for 6 hours. The reaction was cooled in the freezer and the resulting solid was removed by filtration. The solid was washed with ethanol (50 mL). The combined filtrate was concentrated under reduced pressure and diethyl ether (100 mL) was added. Insoluble impurities were removed by filtration and 2.0 M HCl in ether (10 mL) was added to the solution. A precipitate formed immediately. The crude product was added to toluene (100 mL) and heated at reflux temperature for one hour. After cooling to room temperature, the solid product was recovered by filtration, washed with toluene, and dried under vacuum to yield 3.76 g of benzyl (4-aminooxybutyl)carbamate.

### Part C

[0275] N-(4-chloroquinolin-3-yl)valeramide (1.97 g), benzyl (4-aminooxybutyl)carbamate (2.99 g), triethylamine (0.89 g) and 2-propanol (40.69 g) were combined and heated at 80° C. for 3.5 hours. The reaction was cooled to room temperature, filtered, and the filtrate concentrated under reduced pressure. Dichloromethane (20 mL) was added to the resulting solid and the mixture was stirred for twenty minutes. Undissolved solid was removed by filtration and the filtrate was washed with two 10 mL portions of water that had been made slightly acidic by the addition of 20 drops of hydrochloric acid (1.2 M).

[0276] The organic fraction was dried and concentrated under reduced pressure. The crude solid was recrystallized from tetrahydrofuran to provide 2.56 g of benzyl 4-{[2-butyl-1H-imidazo[4,5-c]quinolin-1-yl]oxy}butylcarbamate.

### Part D

[0277] Benzyl 4-{[2-butyl-1H-imidazo[4,5-c]quinolin-1-yl]oxy}butylcarbamate hydrochloride (10.05 g) was dissolved in dichloromethane (80 mL) and extracted with a solution of sodium carbonate (2.02 g) in 30 ml H₂O. The organic layer was cooled in an ice bath and a solution of m-chloroperbenzoic acid (5.93 g, 1.24 eq) dissolved in dichloromethane (30 mL) was slowly added. After 6 hr, ammonium hydroxide (10 mL of a 28-30% aqueous solution) was added to the reaction. A solution of benzenesulfonyl chloride (6.96 g) dissolved in 10 ml dichloromethane was slowly added with vigorous stirring. The cooling bath was removed and the reaction was stirred for an additional 12 hours. The reaction was diluted with water (100 mL) and the organic and aqueous fractions were separated. The aqueous fraction was extracted with dichloromethane (30 mL). The combined organic fractions were washed with two 90 ml portions of 5% sodium carbonate.

[0278] The dichloromethane solution was transferred to a distillation apparatus and 1-pentanol (50 mL) was added. This was warmed to 40° C. and the dichloromethane was removed under reduced pressure. Concentrated hydrochloric acid (50 ml) was then added and the reaction was stirred and heated to 80°. After 11 hours, the solution was cooled to room temperature and diluted with water (100 mL). The aqueous fraction was separated from the 1-pentanol and the 1-pentanol was extracted with water (25 mL). The aqueous fractions were combined. 1-Pentanol (50 mL) was added to the combined aqueous fraction and this was cooled in an ice-bath. With vigorous stirring, solid sodium carbonate was added to bring the pH to 9-10. The mixture was transferred to a separatory funnel and the fractions were separated. The aqueous fraction was extracted with two 25 ml portions of 1-pentanol. The combined 1-pentanol fractions were dried over sodium sulfate and filtered to provide 1-(4-aminobutoxy)-2-butyl-1H-imidazo[4,5-c]quinolin-4-amine dissolved in 1-pentanol.

[0279] The maleate salt of 1-(4-aminobutoxy)-2-butyl-1H-imidazo[4,5-c]quinolin-4-amine was prepared by dissolving maleic acid (4.83 g) in 1-pentanol (50 mL) and adding it with stirring to the solution of 1-(4-aminobutoxy)-2-butyl-1H-imidazo[4,5-c]quinolin-4-amine in 1-pentanol. The resulting precipitate was collected by filtration and dried to yield 7.69 g of 1-(4-aminobutoxy)-2-butyl-1H-imidazo[4,5-c]quinolin-4-amine bis maleate salt. ¹H-NMR (DMSO-d6): δ 0.96 (t, 3H), 1.44 (m, 2H), 1.7-1.95 (m, 4H), 2.02 (m, 2H), 2.8-3.1 (m, 4H), δ 4.43 (t, 2H), 6.07 (s, 4H), 7.57 (t, 1H), 7.73 (t, 1H), 7.80 (d, 1H), 8.16 (d, 1H). Broad peaks for the ammonium protons are seen at approximately δ 7.8 and δ 8.7.

[0280] As an alternative the fumarate salt of 1-(4-aminobutoxy)-2-butyl-1H-imidazo[4,5-c]quinolin-4-amine was prepared by the following procedure. 1-(4-aminobutoxy)-2-butyl-1H-imidazo[4,5-c]quinolin-4-amine (6.53 g) was dissolved in 2-propanol (75 mL) and decolorizing carbon was added. The reaction was heated to reflux, filtered while hot, and cooled to room temperature. A solution of fumaric acid (2.5 g) in 2-propanol was added and the reaction was heated at reflux temperature for 5 minutes. Upon cooling to room temperature a precipitate formed. Filtration followed by drying the product under vacuum yielded 6.6 g of 1-(4-aminobutoxy)-2-butyl-1H-imidazo[4,5-c]quinolin-4-amine fumarate.

[0281] ¹H-NMR (DMSO-d6): δ 0.95 (t, 3H), 1.42 (m, 2H), 1.70-1.92 (m, 4H), 1.92-2.10 (m, 2H), 2.85-3.05 (m, 4H), 4.34 (t, 3H), δ 6.46 (s, 2H), 7.30 (t, 1H), 7.47 (t, 1H), 7.60 (d, 1H), 8.02 (d, 1H). A broad ammonium peak appears at δ 6.77.

### Part E

[0282] 1-(4-Aminobutoxy)-2-butyl-1H-imidazo[4,5-c]quinolin-4-amine fumarate (1.30 g) was dissolved in dichloromethane (25 mL) and the solution washed with 3×15 ml portions of saturated sodium carbonate. The organic fraction was then washed with 15 ml saturated sodium chloride and dried over MgSO₄. The solution was filtered, the solvent removed under reduced pressure and the product was dried under vacuum to give 0.79 g of 1-(4-aminobutoxy)-2-butyl-1H-imidazo[4,5-c]quinolin-4-amine as the free base.

[0283] The 1-(4-aminobutoxy)-2-butyl-1H-imidazo[4,5-c]quinolin-4-amine was dissolved in dichloromethane (20 mL) and methanol (5 mL). Stearic acid (0.71 g) was added and the reaction was stirred to dissolve the stearic acid. 1-Ethyl-3-(3-dimethylaminopropyl) carbodiimide HCl (EDC, 0.45 g) was added and the reaction was stirred at ambient temperature for 16 hours. An additional portion of EDC was added (0.23 g) and the reaction was stirred for an additional 24 hours. Final portions of stearic acid (0.22 g) and EDC (0.37 g) were added to drive the reaction to completion and the reaction was stirred at ambient temperature for another 24 hours. The reaction was concentrated under reduced pressure and the resulting residue was purified by flash column chromatography using a Biotage chromatography system (Si40+M2358-1 SiGel column, 85:15 dichloromethane/methanol isocratic elution). The semi-pure product was purified by flash column chromatography two more times using a 90:10 dichloromethane/methanol isocratic elution, followed by a 95:5 dichloromethane/methanol isocratic elution The fractions containing product were concentrated to yield 1.12 g of N-(4-{[4-amino-2-butyl-1H-imidazo[4,5-c]quinolin-1-yl]oxy}butyl)octadecanamide as an off white waxy solid.

[0284] ¹H-NMR (CDCl₃): δ 0.89 (t, 3H), 1.01 (t, 3H), 1.14-1.42 (m, 28H), 1.50 (m, 2H), 1.65 (m, 2H), 1.74-1.94 (m, 4H), 2.02 (m, 2H), 2.20 (t, 2H), 2.95 (t, 2H), 3.40 (q, 2H), 4.33 (t, 2H), 5.59 (t, 1H), 6.10 (broad s, 2H), 7.39 (m, 1H), δ 7.57 (m, 1H), 7.83 (d, 1H), 8.07 (m, 1H).

### Aqueous Formulation of TLR7/8 Agonist and Helper Lipid

[0285] In certain embodiments, a TLR718 agonist and a helper lipid are combined and subjected to a high energy source to produce an aqueous formulation, for example, a nanosuspension composition. In the certain embodiments. the aqueous formulation includes nanosuspension particles of TLR7/8 agonist and helper lipid having a particle size of at least 1 nm, at least 10 nm, at least 20 nm, at least 30 nm, at least 40 nm. or at least 50 nm. In the certain embodiments, the aqueous formulation includes nanosuspension particles of TLR7/8 agonist and helper lipid having a particle size of up to 450 nm, up to 400 nm, up to 350 nm, up to 300 nm, up to 250 nm, up to 200 nm, up to 150 nm, up to 100 nm, or up to 75 nm

[0286] In the certain embodiments. the aqueous formulation includes nanosuspension particles of TLR7/8 agonist and helper lipid that range in size from 1 nm to 450 nm. such as 1 to 400 nm, 1 to 200 nm, 50 to 200 nm, 50 to 150 nm, 50 to 100 nm, 50 nm to 75 nm. In some embodiments, the size of the nanosuspension particles range from 20 to 100 nm or 20 to 50 nm. In some embodiments, the size of the nanosuspension particles range from 10 to 200 nm, 10 to 100 nm, or 10 to 50 nm.

[0287] In some embodiments, the nanosuspension particles can be filtered through at least a 0 45 micron filter. In some embodiments, the nanosuspension particles can be filtered through a 0.45 micron or smaller pore size filter. In some embodiments, the nanosuspension particles can be filtered through a 0.45 micron filter. In some embodiments, the nanosuspension particles can be filtered through a 0 20 micron filter. In some embodiments, the nanosuspension particles can be filtered through a 0.22 micron filter.

[0288] In some embodiments provided herein, the 1-450 nm size of the aqueous nanosuspension particles that include a TLR7/8 agonist and a helper lipid is stable. In this context. “stable” can refer to a nanosuspension particle's size of less than 450 nm is maintained, and the particles exhibit reduced aggregation, or no aggregation, when compared to a TLR7/8 agonist in the absence of a helper lipid of the disclosure.

[0289] In some embodiments, “stable” refers to a formulation or composition comprised of nanosuspension particles which display little to no aggregation, or reduced aggregation, or demonstrate little to no overall increase in average particle size or polydispersity of the formulation over time compared to the initial particle size.

[0290] The stability of the nanosuspension particles can be measured by techniques familiar to those of skill in the art. In some embodiments, the stability is observed visually.

[0291] Visual inspection can include inspection for particulates, flocculence, or aggregates. In some embodiments, the stability is determined by the size of the nanosuspension particles. For example, the size can be assessed by known techniques in the art, including but not limited to, x-ray and laser diffraction, dynamic light scattering (DLS), CryoEM, or Malvern Zetasize. In some embodiments, the size of the nanosuspension particles refers to the Z-average diameter. In some embodiments, the stability is assessed by the ability of the nanosuspension particles to pass through a filter of a particular size. for example through a 0.20, 0.22 or 0.45 micron filter. In some embodiments. stability is determined by pH. In some embodiments, stability is determined by measurement of the polydispersity index (PdI), for example, with the use of the dynamic light scattering (DLS) technique.

[0292] In some embodiments, the Z-average diameter of the nanosuspension particles increase by less than 50%, less than 40%, less than 30%, less than 25%, less than 20%, less than 15%, less than 12%, less than 10%, less than 7%, less than 5%, less than 3%, or less than 1%. over the time period assayed.

[0293] In some embodiments, the nanosuspension particles are stable at 0-8° C. such as 2-8° C. In some embodiments, the nanosuspension particles are stable at 0° C., 1° C. 2° C., 3° C., 4° C., 5° C., 6° C., 7° C., or 8° C., for at least 1 minute, for at least 5 minutes, for at least 10 minutes, for at least 15 minutes, for at least 20 minutes, for at least 25 minutes, for at least 30 minutes, for at least 35 minutes, for at least 40 minutes, for at least 45 minutes, for at least 50 minutes, for at least 55 minutes, for at least 1 hour, for at least 2 hours, for at least 6 hours, for at least 12 hours, for at least 18 hours. for at least 24 hours, for at least 48 hours, for at least 72 hours, for at least 1 week, for at least 2 weeks, for at least 3 weeks, for at least 1 month, for at least 2 months, for at least 3 months, for at least 4 months, for at least 5 months, for at least 6 months. for at least 7 months. for at least 8 months, for at least 9 months, for at least 10 months. for at least 11 months. for at least 1 year, for at least 2 years. or for at least 5 years.

[0294] In some embodiments, the nanosuspension particles are stable at 20-30° C. In some embodiments. the nanosuspension particle is stable at 25° C. for at least 1 minute, for at least 5 minutes, for at least 10 minutes, for at least 15 minutes, for at least 20 minutes, for at least 25 minutes, for at least 30 minutes, for at least 35 minutes, for at least 40 minutes, for at least 45 minutes, for at least 50 minutes, for at least 55 minutes, for at least 1 hour, for at least 2 hours, for at least 6 hours, for at least 12 hours. for at least 18 hours, for at least 24 hours, for at least 48 hours, for at least 72 hours, for at least 1 week, for at least 2 weeks, for at least 3 weeks, for at least 1 month, for at least 2 months, for at least 3 months, for at least 4 months, for at least 5 months, for at least 6 months, for at least 7 months, for at least 8 months, for at least 9 months, for at least 10 months, for at least 11 months, for at least 1 year, for at least 2 years, or for at least 5 years.

[0295] In some embodiments, the nanosuspension particles are stable at 35-40° C. In some embodiments, the nanosuspension particles are stable at 35° C. 36° C., 37° C., 38° C., 39° C., or 40° C. for at least 1 minute, for at least 5 minutes, for at least 10 minutes, for at least 15 minutes, for at least 20 minutes, for at least 25 minutes, for at least 30 minutes, for at least 35 minutes, for at least 40 minutes, for at least 45 minutes, for at least 50 minutes, for at least 55 minutes, for at least 1 hour, for at least 2 hours, for at least 6 hours, for at least 12 hours, for at least 18 hours, for at least 24 hours. for at least 48 hours, for at least 72 hours, for at least 1 week, for at least 2 weeks, for at least 3 weeks, for at least 1 month, for at least 2 months, for at least 3 months, for at least 4 months, for at least 5 months, for at least 6 months, for at least 7 months, for at least 8 months, for at least 9 months, for at least 10 months, for at least 11 months, for at least 1 year, for at least 2 years, or for at least 5 years.

[0296] In some embodiments, the nanosuspension particle is stable at 57-62° C. In some embodiments, the nanosuspension particles are stable at 57° C., 58° C. 59° C., 60° C., 61° C., or 62° C. for at least 1 minute. for at least 5 minutes, for at least 10 minutes, for at least 15 minutes, for at least 20 minutes, for at least 25 minutes, for at least 30 minutes, for at least 35 minutes, for at least 40 minutes, for at least 45 minutes, for at least 50 minutes, for at least 55 minutes, for at least 1 hour, for at least 2 hours, for at least 6 hours, for at least 12 hours, for at least 18 hours. for at least 24 hours, for at least 48 hours, for at least 72 hours. for at least 1 week, for at least 2 weeks, for at least 3 weeks, for at least 1 month.

[0297] In some embodiments, the nanosuspension particles are stable after 1-4 freeze thaws. In some embodiments, the nanosuspension particles are stable after 1, after 2, after 3, or after 4 freeze thaws.

### Helper Lipids

[0298] The helper lipids form stable aqueous compositions, such as nanosuspensions, that include a TLR7/8 agonist described herein when mixed with water, for example in the presence or absence of an input from a high energy source. In some embodiments, the TLR7/8 agonists of the disclosure contain nonpolar moieties such as hydrocarbon chains. The helper lipid aids in the adsorption of the TLR7/8 agonist to, for example, an aluminum salt.

[0299] In certain embodiments, the helper lipid is a phospholipid or a quaternary ammonium salt lipid. In certain embodiments, the helper lipid is a phospholipid that is a phosphatidylcholine or a phosphoglyceride. In certain embodiments. the helper lipid includes any of the following moieties.

[chemical structure]

wherein X⁻ is an alkali metal counterion and Y⁺ is a halide counterion.

[0300] In certain embodiments. the helper lipid includes a C₁₀₋₂₀alkyl chain. In certain embodiments, the helper lipid includes a C₁₂₋₁₈alkyl chain.

[0301] In certain embodiments, the helper lipid is anionic. In certain embodiments. the helper lipid is cationic. In certain embodiments, the helper lipid is overall neutrally charged. In certain embodiments, the helper lipid is a zwitterion.

[0302] In certain embodiments, suitable helper lipids are shown herein.

[chemical structure]

[chemical structure]

[chemical structure]

[chemical structure]

[0303] In certain embodiments, the helper lipid is selected from DLPG, DMPG, DPPG, DSPG, DOPG, DSTAP, and DVTAP In certain embodiments. the helper lipid is selected from DLPG, DMPG, DPPG, DSPG, DOPG, and DSTAP In certain embodiments. the helper lipid is selected from DLPG, DMPG, DPPG, DSPG, and DOPG.

[0304] In certain embodiments, the helper lipid is selected from DOPC, DSPG, DSTAP, and Polysorbate 80. In certain embodiments. the helper lipid is selected from DSPG and DSTAP. In certain embodiments, the helper lipid is DSPG. In certain embodiments, the helper lipid is DSTAP.

### Combination of TLR7/8 Agonist and Aluminum Salt

[0305] The compositions described herein may also include an aluminum salt, which can be referred to herein as alum. Suitable aluminum salts include aluminum hydroxide, aluminum trihydrate, aluminum oxyhydroxide, aluminum phosphate, aluminum hydroxyphosphate. aluminum hydroxyphosphate sulfate, and potassium aluminum sulfate. Aluminum salts can also be referred to by the formulae: Al(OH)₃, AlH₃O₃, AlH₆O₃, AlO(OH), Al(OH)(PO₄), and KAl(SO₄)₂. Aluminum salts used as co-adjuvants are advantageous because they have a good safety record, augment antibody responses, stabilize antigens, and are relatively simple for large-scale production. (Edelman 2002 Mol. Biotechnol. 21:129-148; Edelman, R. 1980 Rev. Infect. Dis. 2:370-383.)

[0306] In certain embodiments, a stable aqueous formulation of adjuvant including a TLR7/8 agonist with a helper lipid that are adsorbed to an aluminum salt is provided. In certain embodiments, the helper lipid is selected from DOPC, DSPG, DSTAP, and Polysorbate 80, and in certain embodiments, the helper lipid is selected from DSPG and DSTAP.

[0307] The TLR7/8 agonist is associated with, for example, adsorbed onto, the aluminum salt with the aid of the helper lipid. The factors that relate to the selection of each of the components include, but are not limited to, the charges of the components and presence of exchangeable ligands With proper selection of the components, the TLR7/8 agonist and helper lipid can be associated with, such as adsorbed to, the aluminum salt. In certain embodiments, the association, such as adsorption, occurs with in vitro conditions.

[0308] Association or adsorption refers to an interaction between molecules or portions thereof that exhibit mutual affinity or binding capacity, for example due to specific or non-specific binding or interaction, including, but not limited to, biochemical. physiological, and/or chemical interactions. In certain embodiments, such association. for example adsorption, can be determined by UV spectroscopy, SDS-PAGE, or centrifugation studies.

[0309] In some embodiments, at least 25%, at least 40%, at least 50%, at least 65%, at least 70%, at least 75%, at least 80%. at least 85%, at least 90%, at least 95%. at least 97%, at least 99%, of the TLR7/8 agonist with helper lipid present in the composition is associated with aluminum salt particles.

[0310] A skilled artisan can readily determine the dose and number of immunizations needed to induce immune response. Various assays are known and used in the art to measure to level, breadth and durability of the induced immune response. In non-limiting embodiments the methods comprise two immunizations. The interval between immunizations could be readily determined by a skilled artisan. In non-limiting embodiments, the first and second immunization are about 2, 3, 4, 5, 6, 7, 8, 9, 10, 11, 12, 13, 14, 15, 16 weeks apart.

[0311] In certain embodiments the protein dose is in the range of 1-1000 micrograms.

[0312] In certain embodiments the protein dose is in the range of 10-1000 micrograms. In certain embodiments the protein dose is in the range of 100-1000 micrograms. In certain embodiments the protein dose is in the range of 100-200 micrograms. In certain embodiments the protein dose is in the range of 100-300 micrograms. In certain embodiments the protein dose is in the range of 100-400 micrograms. In certain embodiments the protein dose is in the range of 100-500 micrograms. In certain embodiments the protein dose is in the range of 100-600 micrograms. In certain embodiments the protein dose is in the range of 50-100 micrograms. In certain embodiments the protein dose is in the range of 50-150 micrograms. In certain embodiments the protein dose is in the range of 50-200 micrograms. In certain embodiments the protein dose is in the range of 50-250 micrograms. In certain embodiments the protein dose is in the range of 50-300 micrograms. In certain embodiments the protein dose is in the range of 50-350 micrograms. In certain embodiments the protein dose is in the range of 50-400 micrograms. In certain embodiments the protein dose is in the range of 50-450 micrograms. In certain embodiments the protein dose is in the range of 50-500 micrograms. In certain embodiments the protein dose is in the range of 50-550 micrograms. In certain embodiments the protein dose is in the range of 50-600 micrograms. In certain embodiments the protein dose is in the range of 75-100 micrograms. In certain embodiments the protein dose is in the range of 75-125 micrograms. In certain embodiments the protein dose is in the range of 75-150 micrograms. In certain embodiments the protein dose is in the range of 75-175 micrograms. In certain embodiments the protein dose is in the range of 75-200 micrograms. In certain embodiments the protein dose is in the range of 75-225 micrograms. In certain embodiments the protein dose is in the range of 75-250 micrograms. In certain embodiments the protein dose is 10, 25, 50, 75, 100, 125, 150, 175, 200, 225, 250, 275, 300, 325, 350, 375, 400, 425, 450, 475, 500, 525 550, 575, 600, 625, 650, 700, 750, 800, 850, 900, 950 or 1000 micrograms.

[0313] In certain embodiments adjuvant dose is in the range of 1-200 micrograms. In certain embodiments adjuvant dose is in the range of 1-100 micrograms. In certain embodiments the adjuvant dose is 1-50 micrograms. In certain embodiments the adjuvant dose is 1-25 micrograms. In certain embodiments the adjuvant dose is 1-50 micrograms. In certain embodiments the adjuvant dose is 1-20 micrograms. In certain embodiments the adjuvant dose is 1-50 micrograms. In certain embodiments the adjuvant dose is 1-15 micrograms. In certain embodiments the adjuvant dose is 1-50 micrograms. In certain embodiments the adjuvant dose is 1-10 micrograms. In certain embodiments the adjuvant dose is 1-5 micrograms. In certain embodiments the adjuvant dose is 5-10 micrograms. In certain embodiments the adjuvant dose is 5-15 micrograms. In certain embodiments the adjuvant dose is 1, 2, 3, 4, 5, 6, 7, 8, 9, 10, 11, 12, 13, 14, 15, 16, 17, 18, 19, 20, 21, 22, 23, 24, 25, 26, 27, 28, 29, 30, 31, 32, 33, 34, 35, 36, 37, 38, 39, 40, 41, 42, 43, 44, 45, 46, or 45-50 micrograms.

### EXAMPLES

### Example 1A: SARS-CoV-2 Vaccination Induces Neutralizing Antibodies Against Pandemic and Pre-Emergent SARS-Related Coronaviruses in Monkeys

[0314] Betacoronaviruses (betaCoVs) caused the severe acute respiratory syndrome (SARS) and Middle East Respiratory Syndrome (MERS) outbreaks, and now the SARS-CoV-2 pandemic¹⁻⁴. Vaccines that elicit protective immune responses against SARS-CoV-2 and betaCoVs circulating in animals have the potential to prevent future betaCoV pandemics. Here, we show that immunization of macaques with a multimeric SARS-CoV-2 receptor binding domain (RBD) nanoparticle adjuvanted with 3M-052-Alum elicited cross-neutralizing antibody responses against batCoVs, SARS-CoV-1, SARS-CoV-2, and SARS-CoV-2 variants B.1.1.7, P.1, and B.1.351. Nanoparticle vaccination resulted in a SARS-CoV-2 reciprocal geometric mean neutralization IC50 titer of 47,216, and protection against SARS-CoV-2 in macaque upper and lower respiratory tracts. Importantly, nucleoside-modified mRNA encoding a stabilized transmembrane spike or monomeric RBD also induced SARS-CoV-1 and batCoV cross-neutralizing antibodies, albeit at lower titers. These results demonstrate current mRNA vaccines may provide some protection from future zoonotic betaCoV outbreaks, and provide a platform for further development of pan-betaCoV vaccines.

[0315] The emergence of three betacoronavirus (BetaCoV) outbreaks over the last 18 years necessitates the development of countermeasures that can prevent future pandemics¹⁻⁴ SARS-CoV-1 and SARS-CoV-2 (betaCoV group 2b) and MERS (betaCoV group 2c) emerged from cross-species transmission events where humans were infected with bat or camel CoVs⁵⁻⁹. For example, betaCoVs that are genetically similar to SARS-CoV-1 and SARS-CoV-2 and bind to the human ACE2 receptor for virus entry circulate in civets, bats, and Malayan pangolins^{5,6,10-12}. Thus, SARS-related animal coronaviruses represent betaCoVs that can be transmitted to humans. Neutralizing antibodies can prevent or treat betaCoV infection and represent potential countermeasures against current human betaCoVs and pre-emergent viruses¹³⁻²². Cross-neutralizing antibodies that can neutralize multiple betaCoVs, have been isolated from SARS-CoV-1 infected humans^{13,23,24} validating the development of betaCoV vaccines against group 2b Sarbecoviruses²⁵. A critical target of cross-neutralizing antibodies is the receptor binding domain (RBD)^{22,23,25}. RBD immunogenicity can be augmented by arraying multiple copies on nanoparticles, mimicking virus-like particles²⁶⁻³⁰. Vaccine induction of cross-neutralizing antibodies has been reported in in vitro neutralization assays against CoV pseudoviruses in mice^{29,30}. However, it is unknown whether spike vaccination of primates can elicit cross-neutralizing betaCoV antibodies against SARS-CoV-1, bat betaCoVs, or against SARS-CoV-2 escape viruses. Here, we demonstrate the ability of a SARS-CoV-2 RBD 24-mer subunit nanoparticle vaccine-produced with an easily modifiable sortase-ferritin platform³¹—to elicit in monkeys potent cross-neutralizing antibodies against SARS-CoV-1, SARS-CoV-2, SARS-CoV-2 variants B.1.1.7, P.1, and B.1.351, as well as SARS-related bat betaCoVs. RBD nanoparticle vaccination protected monkeys against SARS-CoV-2 after respiratory challenge. Lastly, we show lipid nanoparticle-encapsulated Spike mRNA vaccines similar to those in clinical use elicit cross-neutralizing CoV antibodies, albeit at lower titers.

[0316] We and others have demonstrated the SARS-CoV-2 RBD has an epitope to which broadly cross-reactive neutralizing antibodies can bind^{13,24,32}. The DH1047 RBD antibody cross-neutralizes SARS-CoV-1, CoV-2 and bat CoVs²⁴. To focus the immune response on cross-reactive neutralizing epitopes on betaCoVs, we designed a 24-mer SARS-CoV-2 RBD-ferritin nanoparticle vaccine. The RBD nanoparticle was constructed by first expressing recombinant SARS-CoV-2 RBD with a C-terminal sortase A donor sequence. Next, we expressed the 24-subunit, self-assembling protein nanoparticle Helicobacter pylori ferritin with an N-terminal sortase A acceptor sequence³¹. The RBD and H. pylori ferritin nanoparticle were conjugated together by a sortase A reaction (FIG. 1a, FIG. 5)³¹. Analytical size exclusion chromatography and negative stain electron microscopy confirmed that RBD was conjugated to the surface of the ferritin nanoparticle (FIG. 1a, FIG. 5b,c). The RBD sortase A conjugated nanoparticle (RBD-scNP) bound to human ACE2, the receptor for SARS-CoV-2, and to potently neutralizing RBD antibodies DH1041, DH1042, DH1043, DH1044, and DH1045²⁴ (FIG. 1b). The epitopes of these antibodies are focused on the receptor binding motif within the RBD²⁴. Cross-neutralizing antibody DH1047 also bound to the RBD-scNP (FIG. 1b). The RBD scNP lacked binding to SARS-CoV-2 spike antibodies that bound outside of the RBD (FIG. 1b).

[0317] To assess immunogenicity of the RBD-scNP, we immunized five cynomolgus macaques three times intramuscularly four weeks apart with 100 μg of RBD-scNP (FIG. 1c and FIG. 6a). Immunogenicity of the RBD-scNP was adjuvanted with 5 μg of the TLR7/8 agonist 3M-052 absorbed to 500 μg of alum³³. Immunizations were well-tolerated in macaques (FIG. 7). After a single immunization, all five macaques generated binding IgG antibodies against SARS-CoV-2 RBD and stabilized Spike ectodomain (S-2P) (FIG. 1d). 3M-052-alum enhanced RBD-scNP immunogenicity, but did not elicit SARS-CoV-2 RBD antibodies on its own (FIG. 8a,b). Boosting once maximally increased plasma SARS-CoV-2 RBD and S-2P-specific IgG antibody titers (FIG. 1d). ACE2 competitive binding assays demonstrated the presence of antibodies against the ACE2 binding site within the receptor binding domain. Plasma antibodies blocked the ACE2 binding site on SARS-CoV-2 S-2P by 52% after one immunization and blocked 100% after two immunizations (FIG. 1e). Similarly, plasma antibodies blocked the binding of ACE2-binding site-focused, RBD neutralizing antibody DH1041, although to a lesser degree than ACE2 (FIG. 1e). Vaccine induction of neutralizing antibodies was assessed against a SARS-CoV-2 pseudovirus with an aspartic acid to glycine substitution at position 614 (D614G)³⁴. Two RBD scNP immunizations induced potent serum neutralizing antibodies (FIG. 1f-h). The fifty percent inhibitory reciprocal serum dilution (ID50) neutralization titers ranged from 21,292 to 162,603 (FIG. 1g). We compared these neutralizing titers to cynomolgus macaques immunized twice with 50 μg of a lipid-encapsulated nucleoside-modified mRNA (mRNA-LNP) encoding stabilized transmembrane (TM) Spike (S-2P) that is analogous to the immunogen and vaccine platform in the COVID-19 vaccines authorized for emergency use (FIG. 6b). In cynomolgus macaques, serum neutralization titers against SARS-CoV-2 D614G pseudovirus elicited by RBD-scNP immunization were significantly higher than titers elicited by two S-2P mRNA-LNP immunizations (FIG. 1i, P<0.01 Exact Wilcoxon test, n=5)^{35,36}. The group geometric mean ID50, measured as reciprocal serum dilution, for the macaques immunized with RBD-ScNP was 47,216 compared to 6,469 for mRNA-LNP immunized macaques. When compared to natural infection, RBD-scNP vaccination elicited ID50 neutralization titers higher than those elicited in humans with SARS-CoV-2 symptomatic infection, asymptomatic infection, or infection requiring hospitalization (FIG. 1j). Thus, RBD-scNP adjuvanted with 3M-052-Alum elicits significantly higher neutralizing titers in macaques compared to current vaccine platforms or to natural infection in humans.

[0318] The SARS-CoV-2 variant B.1.1.7 is widespread in the United Kingdom (UK) and is spreading globally^{37,38}. Moreover, the B.1.1.7 variant can have higher infectivity and has mutations in the receptor binding domain that may limit neutralization efficacy of RBD-specific antibodies^{37,38}. Additionally, SARS-CoV-2 variants B1.351 and P.1 share the N501Y mutation with B.1.1.7, and B1.351 lineage viruses have become the dominant strain in the Republic of South Africa³⁸⁻⁴⁰. P.1 and B.1.351 are of concern due to their neutralization-resistant phenotype and mutations in the RBD at K417N, E484K, and N501Y⁴¹. Examination of the cryo-electron microscopy structures of DH1041 or DH1047 bound to S trimer showed that the E484K mutation was present in the binding surface of RBD nAb DH1041, but was distal to the cross-neutralizing nAb DH1047 binding site (FIG. 2a,b). None of the three RBD mutations present in B.1.351, were within the DH1047 binding surface because the DH1047 uses a long 24 amino acid HCDR3 to reach down and contact the RBD without the rest of the antibody contacting N501 or K417 (FIG. 2b). Consistent with these structures, DH1041 binding to wild-type SARS-CoV-2 RBD was knocked out by the E484K mutation (FIG. 2c and FIG. 8), however, DH1047 binding to RBD was unaffected by K417N, E484K, or N501Y (FIG. 2d).

[0319] To determine whether RBD-scNP or mRNA-LNP immunization elicited antibodies can neutralize SARS-CoV-2 variants B.1.1.7, B.1.351, or P.1, we performed pseudovirus neutralization assays with serum from the RBD-scNP or S-2P mRNA-LNP-vaccinated macaques. RBD-scNP macaque serum potently neutralized a pseudovirus bearing the Spike from the B.1.1.7 variant of SARS-CoV-2 (FIG. 2d,e). Similarly, neutralizing antibodies elicited by mRNA-LNP encoding the stabilized TM spike neutralized the B.1.1.7 variant of SARS-CoV-2 equally as well as the D614G variant of SARS-CoV-2, albeit at titers below those observed with RBD-scNP immunization (FIG. 2d,e). Thus, the potentially more transmissible B.1.1.7 variant of SARS-CoV-2 was equally as susceptible to vaccine-induced neutralizing antibodies as the SARS-CoV-2 D614G variant. Next, we determined the neutralizing activity of immune sera against SARS-CoV-2 WA-1, B.1.351, and P.1 pseudoviruses. Macaque serum from RBD-scNP or mRNA-LNP immunization neutralized all three strains of SARS-CoV-2 with ID80 titers more potent for the RBD-scNP group (FIG. 2f-i). Neutralization titers for both groups of immunized macaques decreased against the B.1.351 and P.1 strains of SARS-CoV-2 compared to the WA-1 strain (FIG. 2g,i). On average, the RBD-scNP group neutralization titers decreased by 3-fold against B.1.351 or P.1, whereas the mRNA-LNP group decreased by 6-fold for B.1.351 and 10-fold for P.1 based on ID50 titer (FIG. 2g,i). Additionally, we determined RBD-scNP and S-2P mRNA-LNP immune plasma IgG binding to S ectodomain proteins containing mutations observed in strains circulating in Danish minks, as well as B1.351, P.1, and B.1.1.7 SARS-CoV-2 strains^{38,39,42,43}. Similar to DH1047, the presence of mutations from mink strains of SARS-CoV-2, the South African B1.351, Brazilian P.1 strain, and UK B.1.1.7 strains did not change the binding magnitude for RBD-scNP or mRNA-LNP macaque plasma IgG (FIG. 8). In summary, both vaccines tested here elicited neutralizing antibodies that were unaffected by the mutations in the B.1.1.7 strain. However, neutralizing antibodies elicited by RBD-scNP were more potent for the difficult-to-neutralize B.1.351 and P.1 virus strains than antibodies elicited with transmembrane Spike-2P mRNA-LNP immunization.

[0320] While SARS-CoV-2 wild-type and variant neutralization remain a priority for halting the current pandemic, additional SARS-related CoVs that circulate in humans and animals remain a threat for future outbreaks⁴⁴⁻⁴⁶. Therefore, we examined neutralization of SARS-CoV-1 and SARS-related group 2b batCoV-WIV-1 and SARS-related batCoV-SHC014 viruses by immune sera from macaques vaccinated with the RBD-scNP, mRNA-LNP encoding monomeric RBD or S-2P (Extended Data FIG. 2a-c)^{6,10,454,6}. After two immunizations, RBD-scNP, S-2P mRNA-LNP, and the RBD monomer mRNA-LNP elicited neutralizing antibodies against SARS-CoV-1, batCoV-WIV-1, and batCoV-SHC014 (FIG. 3a, FIG. 9). Neutralization was more potent for replication-competent SARS-CoV-2 virus compared to the other three SARS-related viruses (FIG. 3a, FIG. 9), with neutralization titers varying up to 4-fold within the RBD-scNP group (FIG. 9). Among the three immunogens, RBD-scNP elicited the highest neutralization titers and mRNA-LNP expressing monomer RBD elicited the lowest neutralization titers (FIG. 3a, FIG. 9). Small increases in neutralization potency were gained by boosting a third time with the RBD-scNP (FIG. 3b). Also, RBD-scNP immunization elicited cross-reactive IgG binding against SARS-CoV-2, SARS-CoV-1, batCoV-RaTG13, batCoV-SHCO14, pangolin CoV-GXP4L Spike proteins (FIG. 3c and FIGS. 10a,c). Binding antibody titers were high for these spikes, even in instances where neutralization titers were low indicating non-neutralizing antibodies contributed to binding titers. RBD-scNP immune plasma IgG did not bind the S ectodomain of four endemic human CoVs, nor did it bind MERS-CoV S ectodomain (FIGS. 10a,c). The lack of binding by plasma IgG to these latter five S ectodomains was consistent with RBD sequence divergence among groups 1, 2a, 2b and 2c coronaviruses (FIG. 3f and FIGS. 11-13). Nonetheless, the SARS-CoV-2 spike induced cross-reactive antibodies against multiple group 2b SARS-related betaCoVs, with the highest titers induced by RBD-scNP.

[0321] Immune sera from RBD-scNP-immunized macaques exhibited a similar cross-neutralizing profile as the cross-neutralizing antibody DH1047. DH1047 bound with <0.02 nM affinity to monomeric SARS-CoV-2 RBD (Extended data FIG. 10b), and bound the RBD-scNP (FIG. 1b). DH1047 protects against SARS-CoV-2 infection in macaques and batCoV-WIV-1 infection in mice²⁴; thus the DH1047 epitope is a principal betacoronavirus (CoV) cross-neutralizing antibody target for vaccination. The cross-reactive DH1047 epitope is adjacent to the N-terminus of the receptor binding motif (RBM) distinguishing it from dominant ACE2 binding site-focused neutralizing antibodies such as DH1041²⁴ (FIG. 3d). Antibodies targeting near the DH1047 epitope would be predicted to be cross-reactive with group 2b betaCoVs given the high sequence conservation present in and immediately proximal to the DH1047 epitope (FIG. 3e). Comparison of RBD sequences showed them to be relatively conserved within betaCoV group 2b, but minimally conserved between groups 2b and 2c (FIG. 3f and data FIGS. 11-13). To examine whether RBD-scNP-induced antibodies bound near the DH1047 epitope, we assessed plasma antibody blocking of DH1047 binding to SARS-CoV-2 S-2P ectodomain. Plasma from all RBD-scNP immunized macaques blocked the binding of ACE2 and DH1047 to SARS-CoV-2 S-2P ectodomain (FIG. 3g and FIG. 10d). Since DH1047-blocking plasma antibodies could be SARS-CoV-2-specific, we also examined plasma IgG blocking of DH1047 binding to batCoV-SHCO14. Similar to SARS-CoV-2 S binding, RBD-scNP plasma also potently blocked DH1047 binding to batCoV-SHCO14 (FIG. 3g).

[0322] To determine if RBD-scNP immunization elicited higher frequencies of DH1047 blocking antibodies than other vaccine modalities or SARS-CoV-2 infection, we compared serum DH1047 blocking activity elicited by S-2P mRNA-LNP immunization of macaques (N=5), elicited by Pfizer BNT162b2 mRNA-LNP immunization of humans (N=4), or elicited by SARS-CoV-2 infection in convalescent individuals (N=22). S-2P mRNA-LNP and RBD-scNP immunization of macaques elicited high ACE2 blocking activity in all macaques, but S-2P mRNA-LNP blocking of DH1047 was ˜40% lower compared to RBD-scNP immunization (FIG. 3h and Fi10. d). Vaccination with the Pfizer/BioNTech COVID-19 vaccine BNT162b2 (n=4) elicited ACE2 blocking activity in each individual, and 78% of SARS-CoV-2 convalescent individuals tested had serum AC2 blocking activity (FIG. 3h and FIG. 10d). While 5/5 RBD-scNP vaccinated macaques had 1005 DH1047 serum blocking activity, only 3 of 4 SARS-CoV-2 convalescent and 31% of COVID-19 convalescent individuals had low levels of serum DH1047 blocking activity (FIG. 3h). Thus, in human and macaque S-2P mRNA vaccination and in COVID-19 convalescent individuals, the serum cross-reactive DH1047 antibody response was subdominant, while DH1047-targeted antibodies was a dominant response following RBD-scNP vaccination.

[0323] To determine protection against mucosal coronavirus infection, we challenged RBD scNP-vaccinated and S-2P mRNA-LNP primed/RBD-scNP boosted monkeys with 10⁵ plaque forming units of SARS-CoV-2 virus via intratracheal and intranasal routes (FIG. 4a). RBD scNP-vaccinated or mRNA-LNP primed/RBD-scNP boosted monkeys were challenged after their last boost. Neutralizing antibodies were detectable in all macaques 2 weeks after the final immunization (FIG. 3b and FIG. 14). Bronchoalveolar lavage (BAL) fluid was collected 2 days post challenge (FIG. 4a), and the presence of infectious SARS-CoV-2 in plaque forming units (PFUs) in the lower respiratory tract was determined. Infectious SARS-CoV-2 was detectable in BAL fluid from 5 of 6 unimmunized macaques, but was undetectable in all RBD-scNP and S-2P mRNA-LNP/RBD-scNP-immunized macaques two days after challenge (FIG. 4b). SARS-CoV-2 replication was quantified in the upper and lower respiratory tract as envelope (E) and nucleocapsid (N) subgenomic RNA. Subgenomic (sg) RNA was quantified in fluid from nasal swabs and bronchoalveolar lavage (BAL) two and four days after challenge (FIG. 4a). On day 2 after challenge, in control, unimmunized macaques, there was an average of 1.3×10⁵ and 1.2×10⁴ copies/mL of E gene sgRNA in the nasal swab and BAL fluids, respectively (FIGS. 4c,d). In contrast, RBD-scNP-vaccinated monkeys and 4 of 5 S-2P mRNA-LNP monkeys had undetectable levels of subgenomic envelope E gene RNA in the upper and lower respiratory tract (FIGS. 4c,d). We sampled monkeys again 2 days later to determine if detectable virus replication was present, but found no detectable E gene sgRNA in any vaccinated monkey BAL or nasal swab samples (FIGS. 4b,c). Similarly, all RBD-scNP-vaccinated macaque had undetectable N gene sgRNA in BAL and the nasal swab fluid (FIGS. 4e,f), except one macaque that had 234 copies/mL of N gene sgRNA detected on day 2 in nasal swab fluid (FIG. 4e). Virus replication was undetectable in this macaque by the fourth day after challenge (FIG. 4e). Additionally, all but one macaque administered mRNA-LNP prime/RBD-scNP boost had undetectable N gene sgRNA in BAL or nasal swab samples (FIGS. 4e,f). Lung tissue on from post-challenge day 7, demonstrated SARS-CoV nucleocapsid antigen was undetectable in the lung tissue of all vaccinated macaques, but was detected in all control macaques (FIG. 4g and FIG. 15). Hematoxylin and eosin staining of lung tissue showed reduction in inflammation in immunized compared to control macaques (FIG. 15 and FIG. 17).

[0324] Mucosal responses to SARS-CoV-2 were examined when possible both before and after SARS-CoV-2 challenge (FIG. 16). Concentrated bronchoalveolar lavage fluid (BAL) from both groups of macaques was examined for IgG binding to spike (FIG. 16a), and blocking of ACE-2, DH1041, and DH1047 binding to spike (FIG. 16b-d). Each response was higher in the BAL from monkeys immunized three times with RBD-scNP compared to monkeys immunized two times with S-2P mRNA-LNP and boosted once with RBD-scNP (FIG. 16a-d). However, it should be noted that the BAL was collected six weeks later in macaques immunized twice with S-2P mRNA-LNP and boosted with RBD-scNP compared to macaques immunized with RBD-scNP alone. Unconcentrated nasal wash samples from monkeys immunized with RBD-scNPs or S-2P mRNA-LNP prime/RBD-scNP boost showed similar low levels of spike-binding IgG post challenge (FIG. 16e). Nonetheless, RBD-scNP immunization elicited RBD-specific mucosal antibody responses.

[0325] This study demonstrates that immunization with SARS-CoV-2 Spike as a protein RBD-scNP or as an mRNA-LNP elicits a cross-reactive antibody response can neutralize multiple SARS-related human and bat betaCoVs. These results demonstrate that SARS-CoV-2 vaccination with the RBD-scNP or the stabilized transmembrane spike mRNA-LNP vaccines currently approved for use in humans, can elicit cross-neutralizing antibodies with the potential to prevent future group 2b betaCoV spillover events to humans^{30,44,47}.

[0326] The identification of betaCoV cross-neutralizing antibodies such as DH1047 have shown that the SARS-CoV-2 RBD contains a conserved betaCoV group 2b cross-neutralizing epitope^{13,23,24,48,49}. Thus, the epitope of DH1047 and other cross-neutralizing antibodies are major targets for pancoronavirus vaccines and as well, vaccines aiming to neutralize SARS-CoV-2 variants. Vaccination of macaques in this study showed that cross-neutralizing epitopes on RBD can be potently targeted by primates, with RBD-scNP optimally inducing cross-neutralizing responses. A recent study reported mosaic RBD nanoparticles arrayed with RBDs from various CoVs induced cross-neutralizing antibodies in mice³⁰. Here, we show that cross-neutralizing antibodies are not only elicited by RBD nanoparticles, but also by mRNA-LNPs expressing SARS-CoV-2 stabilized spike of the design currently in mRNA COVID-19 vaccines. The 24-mer RBD-scNP nanoparticle protein adjuvanted with a toll-like receptor agonist 3M-052 adsorbed to alum elicited the highest group 2b cross-neutralizing antibody titers. 3M-052 formulated with alum or in an emulsion has induced long-lasting memory B cells and protection against SHIV challenge in non-human primates^{50,51}. In our HIV-1 studies, we have found that the addition of 3M-052 as an adjuvant boosts neutralizing antibody titers versus no adjuvant. A Phase I clinical study using 3M-052/Alum to induce neutralizing antibody responses to an HIV vaccine candidate is underway (NCT04177355). Thus, this vaccine modality represents a promising first-generation pan-group 2b betaCoV vaccine with the potential to durably inhibit future zoonotic transmission²⁵.

[0327] The emergence of SARS-CoV-2 neutralization-resistant and highly infectious variants continues to be a concern for vaccine efficacy. We found here that RBD protein nanoparticle or mRNA-LNP SARS-CoV-2 spike immunization elicited SARS-CoV-2 neutralizing antibodies can neutralize the predominant SARS-CoV-2 variant D614G as well as the newly-emerged B.1.1.7 UK variant. Thus, while the B.1.1.7 variant may be more transmissible, it was equally as sensitive to vaccine-induced serum neutralization as the predominant circulating SARS-CoV-2 D614G strain. Importantly, cross-reactive RBD-scNP immune sera elicited more potent neutralization of the P.1 and B.1.351 strains of SARS-CoV-2 than two immunizations with transmembrane S-2P mRNA-LNP. The neutralizing antibodies elicited by RBD-scNP and transmembrane S-2P mRNA-LNP were of different specificities since RBD-scNP-induced neutralizing antibodies showed a smaller reduction in neutralization when compared to transmembrane S-2P mRNA-LNP immune sera. Overall, the reduction in neutralization, but not complete knockout of neutralization by each vaccine-induced sera is compatible with the recent demonstration that current COVID-19 vaccines have efficacy, albeit reduced, against the UK B.1.1.7 and South African B1.351 SARS-CoV-2 variants⁵²⁻⁵⁷.

[0328] Protection against asymptomatic infection and the durability of protection remain concerns for current vaccines. The RBD-scNP vaccine induced robust protective immunity for SARS-CoV-2 replication in the upper and lower respiratory tract. This degree of virus suppression in the upper respiratory tract has not been routinely achieved with SARS-CoV-2 challenge in macaques^{58,59} and indicates the goal of inducing SARS-CoV-2 sterilizing immunity with vaccination could be attainable. Additionally, the extraordinarily high neutralization titers achieved by RBD-scNP vaccination bode well for an extended duration of protection. Critically, as we have had 3 coronavirus epidemics in the past 20 years, there is a need to develop effective pancoronavirus vaccines prior to the next pandemic. The RBD-scNP vaccine induces neutralizing antibodies to SARS-CoV-1, SARS-CoV-2, batCoV-WIV-1 and batCoV-SCH014 and represents a platform for producing pancoronavirus vaccines that could prevent, rapidly temper, or extinguish the next spillover of a coronavirus into humans.

### REFERENCES

[0329] 1 Wang, C., Horby, P. W., Hayden, F. G. & Gao, G. F. A novel coronavirus outbreak of global health concern. Lancet 395, 470-473, doi:10.1016/s0140-6736(20)30185-9 (2020).
[0330] 2 Zaki, A. M., van Boheemen, S., Bestebroer, T. M., Osterhaus, A. D. & Fouchier, R. A. Isolation of a novel coronavirus from a man with pneumonia in Saudi Arabia. N Engl J Med 367, 1814-1820, doi:10.1056/NEJMoa1211721 (2012).
[0331] 3 Zhong, N. S. et al. Epidemiology and cause of severe acute respiratory syndrome (SARS) in Guangdong, People's Republic of China, in February, 2003. Lancet 362, 1353-1358, doi:10.1016/s0140-6736(03)14630-2 (2003).
[0332] 4 Zhu, N. et al. A Novel Coronavirus from Patients with Pneumonia in China, 2019. N Engl J Med 382, 727-733, doi:10.1056/NEJMoa2001017 (2020). Zhou, P. et al. A pneumonia outbreak associated with a new coronavirus of probable bat origin. Nature 579, 270-273, doi:10.1038/s41586-020-2012-7 (2020).
[0333] 6 Li, W. et al. Bats are natural reservoirs of SARS-like coronaviruses. Science 310, 676-679, doi:10.1126/science.1118391 (2005).
[0334] 7 Olival, K. J. et al. Host and viral traits predict zoonotic spillover from mammals. Nature 546, 646-650, doi:10.1038/nature22975 (2017).
[0335] 8 Memish, Z. A. et al. Human infection with MERS coronavirus after exposure to infected camels, Saudi Arabia, 2013. Emerg Infect Dis 20, 1012-1015, doi:10.3201/eid2006.140402 (2014).
[0336] 9 Sabir, J. S. et al. Co-circulation of three camel coronavirus species and recombination of MERS-CoVs in Saudi Arabia. Science 351, 81-84, doi:10.1126/science.aac8608 (2016).
[0337] 10 Ge, X. Y. et al. Isolation and characterization of a bat SARS-like coronavirus that uses the ACE2 receptor. Nature 503, 535-538, doi:10.1038/nature12711 (2013).
[0338] 11 Guan, Y. et al. Isolation and characterization of viruses related to the SARS coronavirus from animals in southern China. Science 302, 276-278, doi:10.1126/science.1087139 (2003).
[0339] 12 Xiao, K. et al. Isolation of SARS-CoV-2-related coronavirus from Malayan pangolins. Nature 583, 286-289, doi:10.1038/s41586-020-2313-x (2020).
[0340] 13 Pinto, D. et al. Cross-neutralization of SARS-CoV-2 by a human monoclonal SARS-CoV antibody. Nature 583, 290-295, doi:10.1038/s41586-020-2349-y (2020).
[0341] 14 Shi, R. et al. A human neutralizing antibody targets the receptor-binding site of SARS-CoV-2. Nature 584, 120-124, doi:10.1038/s41586-020-2381-y (2020).
[0342] 15 Ju, B. et al. Human neutralizing antibodies elicited by SARS-CoV-2 infection. Nature 584, 115-119, doi:10.1038/s41586-020-2380-z (2020).
[0343] 16 Robbiani, D. F. et al. Convergent antibody responses to SARS-CoV-2 in convalescent individuals. Nature 584, 437-442, doi:10.1038/s41586-020-2456-9 (2020).
[0344] 17 Zost, S. J. et al. Potently neutralizing and protective human antibodies against SARS-CoV-2. Nature 584, 443-449, doi:10.1038/s41586-020-2548-6 (2020).
[0345] 18 Liu, L. et al. Potent neutralizing antibodies against multiple epitopes on SARS-CoV-2 spike. Nature 584, 450-456, doi:10.1038/s41586-020-2571-7 (2020).
[0346] 19 Hansen, J. et al. Studies in humanized mice and convalescent humans yield a SARS-CoV-2 antibody cocktail. Science 369, 1010-1014, doi:10.1126/science.abd0827 (2020).
[0347] 20 Brouwer, P. J. M. et al. Potent neutralizing antibodies from COVID-19 patients define multiple targets of vulnerability. Science 369, 643-650, doi:10.1126/science.abc5902 (2020).
[0348] 21 Rogers, T. F. et al. Isolation of potent SARS-CoV-2 neutralizing antibodies and protection from disease in a small animal model. Science 369, 956-963, doi:10.1126/science.abc7520 (2020).
[0349] 22 Piccoli, L. et al. Mapping Neutralizing and Immunodominant Sites on the SARS-CoV-2 Spike Receptor-Binding Domain by Structure-Guided High-Resolution Serology. Cell 183, 1024-1042.e1021, doi:10.1016/j.cell.2020.09.037 (2020).
[0350] 23 Wec, A. Z. et al. Broad neutralization of SARS-related viruses by human monoclonal antibodies. Science 369, 731-736, doi:10.1126/science.abc7424 (2020).
[0351] 24 Li, D. et al. The functions of SARS-CoV-2 neutralizing and infection-enhancing antibodies in vitro and in mice and nonhuman primates. bioRxiv, doi:10.1101/2020.12.31.424729 (2021).
[0352] 25 Burton, D. R. & Walker, L. M. Rational Vaccine Design in the Time of COVID-19. Cell Host Microbe 27, 695-698, doi:10.1016/j.chom.2020.04.022 (2020).
[0353] 26 López-Sagaseta, J., Malito, E., Rappuoli, R. & Bottomley, M. J. Self-assembling protein nanoparticles in the design of vaccines. Comput Struct Biotechnol J 14, 58-68, doi:10.1016/j.csbj.2015.11.001 (2016).
[0354] 27 Bangaru, S. et al. Structural analysis of full-length SARS-CoV-2 spike protein from an advanced vaccine candidate. Science 370, 1089-1094, doi:10.1126/science.abe1502 (2020).
[0355] 28 Walls, A. C. et al. Elicitation of Potent Neutralizing Antibody Responses by Designed Protein Nanoparticle Vaccines for SARS-CoV-2. Cell 183, 1367-1382 e1317, doi:10.1016/j.cell.2020.10.043 (2020).
[0356] 29 Ma, X. et al. Nanoparticle Vaccines Based on the Receptor Binding Domain (RBD) and Heptad Repeat (HR) of SARS-CoV-2 Elicit Robust Protective Immune Responses. Immunity 53, 1315-1330 e1319, doi:10.1016/j.immuni.2020.11.015 (2020).
[0357] 30 Cohen, A. A. et al. Mosaic nanoparticles elicit cross-reactive immune responses to zoonotic coronaviruses in mice. Science, doi:10.1126/science.abf6840 (2021).
[0358] 31 Saunders, K. O. et al. Targeted selection of HIV-specific antibody mutations by engineering B cell maturation. Science 366, doi:10.1126/science.aay7199 (2019).
[0359] 32 Rappazzo, C. G. et al. Broad and potent activity against SARS-like viruses by an engineered human monoclonal antibody. Science, doi:10.1126/science.abf4830 (2021).
[0360] 33 Fox, C. B. et al. Adsorption of a synthetic TLR7/8 ligand to aluminum oxyhydroxide for enhanced vaccine adjuvant activity: A formulation approach. J Control Release 244, 98-107, doi:10.1016/j.jconrel.2016.11.011 (2016).
[0361] 34 Korber, B. et al. Tracking Changes in SARS-CoV-2 Spike: Evidence that D614G Increases Infectivity of the COVID-19 Virus. Cell 182, 812-827.e819, doi:10.1016/j.cell.2020.06.043 (2020).
[0362] 35 Baden, L. R. et al. Efficacy and Safety of the mRNA-1273 SARS-CoV-2 Vaccine. N Engl J Med, doi:10.1056/NEJMoa2035389 (2020).
[0363] 36 Polack, F. P. et al. Safety and Efficacy of the BNT162b2 mRNA Covid-19 Vaccine. N Engl J Med 383, 2603-2615, doi:10.1056/NEJMoa2034577 (2020).
[0364] 37 Galloway, S. E. et al. Emergence of SARS-CoV-2 B.1.1.7 Lineage—United States, Dec. 29, 2020-Jan. 12, 2021. MMDWR Morb Mortal Wkly Rep 70, 95-99, doi:10.15585/mmwr.mm7003e2 (2021).
[0365] 38 Leung, K., Shum, M. H., Leung, G. M., Lam, T. T. & Wu, J. T. Early transmissibility assessment of the N501Y mutant strains of SARS-CoV-2 in the United Kingdom, October to November 2020. Euro Surveill 26, doi:10.2807/1560-7917.ES.2020.26.1.2002106 (2021).
[0366] 39 Faria, N. R. et al. Genomic characterisation of an emergent SARS-CoV-2 lineage in Manaus: preliminary findings. Virological (2021).
[0367] 40 Tegally, H. et al. Sixteen novel lineages of SARS-CoV-2 in South Africa. Nat Med, doi:10.1038/s41591-021-01255-3 (2021).
[0368] 41 Wibmer, C. K. et al. SARS-CoV-2 501Y.V2 escapes neutralization by South African COVID-19 donor plasma. bioRxiv, doi:10.1101/2021.01.18.427166 (2021).
[0369] 42 Lassaunibre, R. et al. SARS-CoV-2 spike mutations arising in Danish mink and their spread to humans, <https://files.ssi.dk/Mink-cluster-5-short-report_AFO2> (2021).
[0370] 43 Basile, K. et al. Cell-based culture of SARS-CoV-2 informs infectivity and safe de-isolation assessments during COVID-19. Clin Infect Dis, doi:10.1093/cid/ciaal579 (2020).
[0371] 44 Menachery, V. D., Graham, R. L. & Baric, R. S. Jumping species—a mechanism for coronavirus persistence and survival. Curr Opin Virol 23, 1-7, doi:10.1016/j.coviro.2017.01.002 (2017).
[0372] 45 Menachery, V. D. et al. A SARS-like cluster of circulating bat coronaviruses shows potential for human emergence. Nat Med 21, 1508-1513, doi:10.1038/nm.3985 (2015).
[0373] 46 Menachery, V. D. et al. SARS-like WIV1-CoV poised for human emergence. Proc Natl Acad Sci USA 113, 3048-3053, doi:10.1073/pnas.1517719113 (2016).
[0374] 47 Cui, J., Li, F. & Shi, Z. L. Origin and evolution of pathogenic coronaviruses. Nat Rev Microbiol 17, 181-192, doi:10.1038/s41579-018-0118-9 (2019).
[0375] 48 Liu, H. et al. Cross-Neutralization of a SARS-CoV-2 Antibody to a Functionally Conserved Site Is Mediated by Avidity. Immunity 53, 1272-1280 e1275, doi:10.1016/j.immuni.2020.10.023 (2020).
[0376] 49 Wang, C. et al. A human monoclonal antibody blocking SARS-CoV-2 infection. Nat Commun 11, 2251, doi:10.1038/s41467-020-16256-y (2020).
[0377] 50 Arunachalam, P. S. et al. T cell-inducing vaccine durably prevents mucosal SHIV infection even with lower neutralizing antibody titers. Nat Med 26, 932-940, doi:10.1038/s41591-020-0858-8 (2020).
[0378] 51 Petitdemange, C. et al. Vaccine induction of antibodies and tissue-resident CD8+ T cells enhances protection against mucosal SHIV-infection in young macaques. JCI Insight 4, doi:10.1172/jci.insight.126047 (2019).
[0379] 52 Muik, A. et al. Neutralization of SARS-CoV-2 lineage B.1.1.7 pseudovirus by BNT162b2 vaccine-elicited human sera. Science, doi:10.1126/science.abg6105 (2021).
[0380] 53 Wu, K. et al. mRNA-1273 vaccine induces neutralizing antibodies against spike mutants from global SARS-CoV-2 variants. bioRxiv, doi:10.1101/2021.01.25.427948 (2021).
[0381] 54 Cele, S. et al. Escape of SARS-CoV-2 501Y.V2 variants from neutralization by convalescent plasma. medRxiv, 2021.2001.2026.21250224, doi:10.1101/2021.01.26.21250224 (2021).
[0382] 55 Collier, D. et al. Impact of SARS-CoV-2 B.1.1.7 Spike variant on neutralisation potency of sera from individuals vaccinated with Pfizer vaccine BNT162b2. medRxiv, 2021.2001.2019.21249840, doi:10.1101/2021.01.19.21249840 (2021).
[0383] 56 Wang, Z. et al. mRNA vaccine-elicited antibodies to SARS-CoV-2 and circulating variants. bioRxiv, 2021.2001.2015.426911, doi:10.1101/2021.01.15.426911 (2021).
[0384] 57 Wibmer, C. K. et al. SARS-CoV-2 501Y.V2 escapes neutralization by South African COVID-19 donor plasma. bioRxiv, 2021.2001.2018.427166, doi:10.1101/2021.01.18.427166 (2021).
[0385] 58 Yu, J. et al. DNA vaccine protection against SARS-CoV-2 in rhesus macaques. Science 369, 806-811, doi:10.1126/science.abc6284 (2020).
[0386] 59 Mercado, N. B. et al. Single-shot Ad26 vaccine protects against SARS-CoV-2 in rhesus macaques. Nature 586, 583-588, doi:10.1038/s41586-020-2607-z (2020).
[0387] 60 Laczko, D. et al. A Single Immunization with Nucleoside-Modified mRNA Vaccines Elicits Strong Cellular and Humoral Immune Responses against SARS-CoV-2 in Mice. Immunity 53, 724-732 e727, doi:10.1016/j.immuni.2020.07.019 (2020).
[0388] 61 Pardi, N. et al. Zika virus protection by a single low-dose nucleoside-modified mRNA vaccination. Nature 543, 248-251, doi:10.1038/nature21428 (2017).
[0389] 62 Wrapp, D. et al. Cryo-EM structure of the 2019-nCoV spike in the prefusion conformation. Science 367, 1260-1263, doi:10.1126/science.abb2507 (2020).
[0390] 63 Hsieh, C. L. et al. Structure-based Design of Prefusion-stabilized SARS-CoV-2 Spikes. bioRxiv, doi:10.1101/2020.05.30.125484 (2020).
[0391] 64 Zhou, T. et al. Structure-Based Design with Tag-Based Purification and In-Process Biotinylation Enable Streamlined Development of SARS-CoV-2 Spike Molecular Probes. Cell Rep 33, 108322, doi:10.1016/j.celrep.2020.108322 (2020).
[0392] 65 Berry, J. D. et al. Development and characterisation of neutralising monoclonal antibody to the SARS-coronavirus. J Virol Methods 120, 87-96, doi:10.1016/j.jviromet.2004.04.009 (2004).
[0393] 66 Coleman, C. M. & Frieman, M. B. Growth and Quantification of MERS-CoV Infection. Curr Protoc Microbiol 37, 15E 12 11-19, doi:10.1002/9780471729259.mc15e02s37 (2015).
[0394] 67 Kint, J., Maier, H. J. & Jagt, E. Quantification of infectious bronchitis coronavirus by titration in vitro and in ovo. Methods Mol Biol 1282, 89-98, doi:10.1007/978-1-4939-2438-7_9 (2015).
[0395] 68 Naldini, L., Blomer, U., Gage, F. H., Trono, D. & Verma, I. M. Efficient transfer, integration, and sustained long-term expression of the transgene in adult rat brains injected with a lentiviral vector. Proc Natl Acad Sci USA 93, 11382-11388, doi:10.1073/pnas.93.21.11382 (1996).
[0396] 69 Yount, B. et al. Reverse genetics with a full-length infectious cDNA of severe acute respiratory syndrome coronavirus. Proc Natl Acad Sci USA 100, 12995-13000, doi:10.1073/pnas.1735582100 (2003).
[0397] 70 Scobey, T. et al. Reverse genetics with a full-length infectious cDNA of the Middle East respiratory syndrome coronavirus. Proc Natl Acad Sci USA 110, 16157-16162, doi:10.1073/pnas.1311542110 (2013).
[0398] 71 Hou, Y. J. et al. SARS-CoV-2 Reverse Genetics Reveals a Variable Infection Gradient in the Respiratory Tract. Cell 182, 429-446 e414, doi:10.1016/j.cell.2020.05.042 (2020).
[0399] 72 Edgar, R. C. Search and clustering orders of magnitude faster than BLAST. Bioinformatics 26, 2460-2461, doi:10.1093/bioinformatics/btq461 (2010).
[0400] 73 Nakamura, T., Yamada, K. D., Tomii, K. & Katoh, K. Parallelization of MAFFT for large-scale multiple sequence alignments. Bioinformatics 34, 2490-2492, doi:10.1093/bioinformatics/bty121 (2018).
[0401] 74 Valdar, W. S. Scoring residue conservation. Proteins 48, 227-241, doi:10.1002/prot.10146 (2002).

### Methods

[0402] Animals and immunizations. Rhesus and cynomolgus macaques were housed and treated in AAALAC-accredited institutions. The study protocol and all veterinarian procedures were approved by the Bioqual IACUC per a memorandum of understanding with the Duke IACUC, and were performed based on standard operating procedures. Nucleoside-modified messenger RNA encapsulated in lipid nanoparticles (mRNA-LNP) was prepared as previously stated^{60,61} Rhesus macaques (n=8) were immunized intramuscularly with 50 μg of mRNA-LNP encoding the receptor binding domain monomer. Cynomolgus macaques (n=5) were immunized twice with 50 μg of mRNA-LNP encoding the transmembrane Spike protein stabilized with K986P and V987P mutations and boosted once with 100 μg of RBD-scNP adjuvanted with 5 μg of 3M-052 aqueous formulation (AF) admixed with 500 μg of Alum in PBS. An additional group of cynomolgus macaques (n=5) were immunized in the right and left quadriceps with 100 μg of RBD-scNP adjuvanted with 5 μg of 3M-052 aqueous formulation (AF) admixed with 500 μg of Alum in PBS 33. The mixture for immunization consisted of 250 μL of RBD-scNP mixed with 250 μL of 0.02 mg/ml 3M-052, 2 mg/ml Alum. Animals were evaluated by Bioqual veterinary staff before during and after immunizations. In the animals studied, CBCs and chemistries were obtained throughout the immunization regimen and no significant abnormalities were noted. Of the 10 cynomolgus macaques, there were no adverse events reported at injection sites. Over the course of the study, 2 cynomolgus macaques experienced slight weight loss. Two cynomolgus macaques showed a single incidence of poor appetite, with one additional cynomolgus macaque showing poor appetite intermittently throughout the study. Additionally, one macaque presented with an infected lymph node biopsy site that responded to appropriate veterinary treatment. Biospecimens before challenge, 2 days post-challenge, and 4 days post challenge were collected as described previously²⁴.

[0403] SARS-CoV-2 intranasal and intratracheal challenge. All animals were challenged at week 11 (3 weeks after last vaccination) through combined intratracheal (IT, 3.0 mL) and intranasal (IN, 0.5 mL per nostril) inoculation with an infectious dose of 105 PFU of SARS-CoV-2 (2019-nCoV/USA-WA1/2020). The stock was generated at BIOQUAL (lot #030120-1030, 3.31×10⁵ PFU/mL) from a p4 seed stock obtained from BEI Resources (NR-52281). The stock underwent deep sequencing to confirm homology with the WA1/2020 isolate. Virus was stored at −80° C. prior to use, thawed by hand and placed immediately on wet ice. Stock was diluted to 2.5×10⁴ PFU/mL in PBS and vortexed gently for 5 seconds prior to inoculation. Nasal swabs, bronchoalveolar lavage (BAL), plasma, and serum samples were collected seven days before, two days after, and four days after challenge. Unimmunized macaques (n=50 were used as a negative control group. Protection from SARS-CoV-2 infection was determined by quantitative PCR of SARS-CoV-2 subgenomic envelope (E) and the more sensitive nucleocapsid (N) RNA (E or N sgRNA)³⁹ as stated herein.

[0404] SARS-CoV-2 protein production. The CoV ectodomain constructs were produced and purified as described previously⁶². The Spike (S) ectodomain was stabilized by the introduction of 2 prolines at amino acid positions 986 and 987 and referred to as S-2P. Plasmids encoding Spike-2P and HexaPro⁶³ were transiently transfected in FreeStyle 293 cells (Thermo Fisher) using Turbo293 (SpeedBiosystems) or 293Fectin (ThermoFisher). The constructs contained an HRV 3C-cleavable C-terminal twinStrepTagII-8×His tag. On day 6, cell-free culture supernatant was generated by centrifugation of the culture and filtering through a 0.8 um filter. Protein was purified from filtered cell culture supernatants by StrepTactin resin (IBA) and by size exclusion chromatography using Superose 6 column (GE Healthcare) in 10 mM Tris pH8,150 mM NaCl or 2 mM Tris pH 8, 200 mM NaCl, 0.02% NaN₃. ACE-2-Fc was expressed by transient transfection of Freestyle 293-F cells⁶². ACE2-Fc was purified from cell culture supernatant by HiTrap protein A column chromatography and Superdex200 size exclusion chromatography in 10 mM Tris pH8,150 mM NaCl. SARS-CoV-2 NTD was produced as previously described⁶⁴. SARS-CoV-2 fusion peptide was synthesized (GenScript).

[0405] Sortase A conjugation of SARS-CoV-2 RBD to H. pylori ferritin nanoparticles. Wuhan strain SARS-CoV-2 RBD was expressed with sortase A donor sequence LPETGG (SEQ ID NO: 16) encoded at its c-terminus. C-terminal to the sortase A donor sequence was an HRV-3C cleavage site, 8×his tag (SEQ ID NO: 17), and a twin StrepTagII (IBA). The SARS-CoV-2 RBD was expressed in Freestyle293 cells and purified by StrepTactin affinity chromatography (IBA) and superdex200 size exclusion chromatography as stated herein. H. pylori ferritin particles were expressed with a pentaglycine sortase A acceptor sequence encoded at its N-terminus of each subunit. For affinity purification of ferritin particles, 6×His tags (SEQ ID NO: 48) were appended C-terminal to a HRV3C cleavage site. Ferritin particles with a sortase A N-terminal tag were buffer exchanged into 50 mM Tris, 150 mM NaCl, 5 mM CaCI2, pH7.5. 180 μM SARS-CoV-2 RBD was mixed with 120 μM of ferritin subunits and incubated with 100 μM of sortase A overnight at room temperature. Following incubation conjugated particles were isolated from free ferritin or free RBD by size exclusion chromatography using a Superose6 16/60 column.

[0406] Biolayer interferometry binding assays. Binding was measured using an OctetRed 96 (ForteBio). Anti-human IgG capture (AHC) sensor tips (Forte Bio) were hydrated for at least 10 minutes in PBS. ACE2 and monoclonal antibodies were diluted to 20 μg/mL in PBS and placed in black 96-well assay plate. The influenza antibody CH65 was used as the background reference antibody. The RBD nanoparticle was diluted to 50 μg/mL in PBS and added to the assay plate. Sensor tips were loaded with antibody for 120 s. Subsequently, the sensor tips were washed for 60 s in PBS to removed unbound antibody. The sensor tips were incubated in a fresh well of PBS to establish baseline reading before being dipped into RBD-scNP to allow association for 400 s. To measure dissociation of the antibody-RBD-scNP complex, the tip was incubated in PBS for 600 s. At the end of dissociation, the tip was ejected and a new tip was attached to load another antibody. The data was analyzed with Data Analysis HT v12 (ForteBio). Background binding observed with CH65 was subtracted from all values. All binding curves were aligned to the start of association. The binding response at the end of the 400 s association phase was plotted in GraphPad Prism v9.0.

[0407] Surface plasmon resonance (SPR) assays. SPR measurements of DH1047 antigen binding fragment (Fab) binding to monomeric SARS-CoV-2 receptor binding domain (RBD) proteins were performed in HBS-EP+ running buffer using a Biacore S200 instrument (Cytiva). Assays were performed in the DHVI BIA Core Facility. The RBD was first captured via its twin-StrepTagII onto a Series S Streptavidin chip to a level of 300-400 resonance units (RU). The antibody Fabs were injected at 0.5 to 500 nM over the captured S proteins using the single cycle kinetics injection mode at a flow rate of 50 μL/min. Fab association occurred for 180 s followed by a dissociation of 360 seconds after the end of the association phase. At the end of the dissociation phase the RBD was regenerated with a 30 s injection of glycine pH1.5. Binding values were analyzed with Biacore S200 Evaluation software (Cytiva). References included blank streptavidin surface along with blank buffer binding and was subtracted from DH1047 values to account for signal drift and non-specific protein binding. A 1:1 Langmuir model with a local Rmax was used for curve fitting. Binding rates and constants were derived from the curve. Representative results from two independent experiments are shown.

[0408] BAL plaque assay. SARS-CoV-2 Plaque assays were performed in the Duke Regional Biocontainment BSL3 Laboratory (Durham, NC) as previously described⁶⁵. Serial dilutions of BAL fluid-were incubated with Vero E6 cells in a standard plaque assay^{66,67}. BAL and cells were incubated at 37° C., 5% C02 for 1 hour. At the end of the incubation, 1 mL of a viscous overlay (1:1 2×DMEM and 1.2% methylcellulose) was added to each well. Plates are incubated for 4 days. After fixation, staining and washing, plates were dried and plaques from each dilution of BAL sample were counted. Data are reported as plaque forming units per milliliter of BAL fluid.

[0409] SARS-CoV-2 pseudovirus neutralization. For SARS-CoV-2 D614G and SARS-CoV-2 B.1.1.7 pseudovirus neutralization assays, neutralization of SARS-CoV-2 Spike-pseudotyped virus was performed by adapting an infection assay described previously with lentiviral vectors and infection in 293T/ACE2.MF (the cell line was kindly provided by Drs. Mike Farzan and Huihui Mu at Scripps). Cells were maintained in DMEM containing 10% FBS and 50 μg/ml gentamicin. An expression plasmid encoding codon-optimized full-length spike of the Wuhan-1 strain (VRC7480), was provided by Drs. Barney Graham and Kizzmekia Corbett at the Vaccine Research Center, National Institutes of Health (USA). The D614G mutation was introduced into VRC7480 by site-directed mutagenesis using the QuikChange Lightning Site-Directed Mutagenesis Kit from Agilent Technologies (Catalog #210518). The mutation was confirmed by full-length spike gene sequencing. Pseudovirions were produced in HEK 293T/17 cells (ATCC cat. no. CRL-11268) by transfection using Fugene 6 (Promega, Catalog #E2692). Pseudovirions for 293T/ACE2 infection were produced by co-transfection with a lentiviral backbone (pCMV ΔR8.2) and firefly luciferase reporter gene (pHR′ CMV Luc)⁶⁸. Culture supernatants from transfections were clarified of cells by low-speed centrifugation and filtration (0.45 μm filter) and stored in 1 ml aliquots at −80° C.

[0410] For 293T/ACE2 neutralization assays, a pre-titrated dose of virus was incubated with 8 serial 3-fold or 5-fold dilutions of mAbs in duplicate in a total volume of 150 μL for 1 h at 37° C. in 96-well flat-bottom poly-L-lysine-coated culture plates (Corning Biocoat). Cells were suspended using TrypLE express enzyme solution (Thermo Fisher Scientific) and immediately added to all wells (10,000 cells in 100 μL of growth medium per well). One set of 8 control wells received cells+virus (virus control) and another set of 8 wells received cells only (background control). After 66-72 h of incubation, medium was removed by gentle aspiration and 30 μL of Promega 1× lysis buffer was added to all wells. After a 10-minute incubation at room temperature, 100 μl of Bright-Glo luciferase reagent was added to all wells. After 1-2 minutes, 110 μl of the cell lysate was transferred to a black/white plate (Perkin-Elmer). Luminescence was measured using a PerkinElmer Life Sciences, Model Victor2 luminometer.

[0411] To make WA-1, P.1, and B.1.351 SARS-CoV-2 pseudoviruses, human codon-optimized cDNA encoding SARS-CoV-2 S glycoproteins of various strains were synthesized by GenScript and cloned into eukaryotic cell expression vector pcDNA 3.1 between the BamHI and XhoI sites. Pseudovirions were produced by co-transfection of Lenti-X 293T cells with psPAX2(gag/pol), pTrip-luc lentiviral vector and pcDNA 3.1 SARS-CoV-2-spike-deltaC19, using Lipofectamine 3000. The supernatants were harvested at 48h post transfection and filtered through 0.45-μm membranes and titrated using 293-ACE2-TMPRSS2 cells (HEK293T cells that express ACE2 protein).

[0412] For the neutralization assay, 50 μL of SARS-CoV-2 S pseudovirions were pre-incubated with an equal volume of medium containing serum at varying dilutions at room temperature for 1 h, then virus-antibody mixtures were added to 293T-ACE2 (WA-1 and B.1.351 assays) or 293-ACE2-TMPRSS2 (WA-1 and P.1 assays) cells in a 96-well plate. After a 3 h incubation, the inoculum was replaced with fresh medium. Cells were lysed 24 h later, and luciferase activity was measured using luciferin. Controls included cell only control, virus without any antibody control and positive control sera. Neutralization titers are the serum dilution (ID50/ID80) at which relative luminescence units (RLU) were reduced by 50% and 80% compared to virus control wells after subtraction of background RLUs.

[0413] Live virus neutralization assays. Full-length SARS-CoV-2, SARS-CoV, WIV-1, and RsSHC014 viruses were designed to express nanoluciferase (nLuc) and were recovered via reverse genetics as described previously 6971 Virus titers were measured in Vero E6 USAMRIID cells, as defined by plaque forming units (PFU) per ml, in a 6-well plate format in quadruplicate biological replicates for accuracy. For the 96-well neutralization assay, Vero E6 USAMRID cells were plated at 20,000 cells per well the day prior in clear bottom black walled plates. Cells were inspected to ensure confluency on the day of assay. Serum samples were tested at a starting dilution of 1:20 and were serially diluted 3-fold up to nine dilution spots. Serially diluted serum samples were mixed in equal volume with diluted virus. Antibody-virus and virus only mixtures were then incubated at 37° C. with 5% C02 for one hour. Following incubation, serially diluted sera and virus only controls were added in duplicate to the cells at 75 PFU at 37° C. with 5% C02. After 24 hours, cells were lysed, and luciferase activity was measured via Nano-Glo Luciferase Assay System (Promega) according to the manufacturer specifications. Luminescence was measured by a Spectramax M3 plate reader (Molecular Devices, San Jose, CA). Virus neutralization titers were defined as the sample dilution at which a 50% reduction in RLU was observed relative to the average of the virus control wells. Prebleed or unimmunized control macaque values were subtracted from WIV-1 neutralization titers, but all other viruses were not background subtracted.

[0414] Biocontainment and biosafety. All work described here was performed with approved standard operating procedures for SARS-CoV-2 in a biosafety level 3 (BSL-3) facility conforming to requirements recommended in the Microbiological and Biomedical Laboratories, by the U.S. Department of Health and Human Service, the U.S. Public Health Service, and the U.S. Center for Disease Control and Prevention (CDC), and the National Institutes of Health (NIH).

[0415] Plasma and mucosal IgG blocking of ACE2 binding. For ACE2 blocking assays, plates were coated with 2 μg/mL recombinant ACE2 protein, then washed and blocked with 3% BSA in 1×PBS. While assay plates blocked, purified antibodies were diluted as stated herein, only in 1% BSA with 0.05% Tween-20. In a separate dilution plate Spike-2P protein was mixed with the antibodies at a final concentration equal to the EC50 at which spike binds to ACE2 protein. The mixture was allowed to incubate at room temperature for 1 hour. Blocked assay plates were then washed and the antibody-spike mixture was added to the assay plates for a period of 1 hour at room temperature. Plates were washed and a polyclonal rabbit serum against the same spike protein (nCoV-1 nCoV-2P.293F) was added for 1 hour, washed and detected with goat anti rabbit-HRP (Abcam cat #ab97080) followed by TMB substrate. The extent to which antibodies were able to block the binding spike protein to ACE2 was determined by comparing the OD of antibody samples at 450 nm to the OD of samples containing spike protein only with no antibody. The following formula was used to calculate percent blocking: blocking %=(100−(OD sample/OD of spike only)*100).

[0416] Plasma and mucosal IgG blocking of RBD monoclonal antibody binding. Blocking assays for DH1041 and DH1047 were performed as stated herein for ACE2, except plates were coated with DH1041 or DH1047 instead of ACE2.

[0417] Plasma and mucosal IgG ELISA binding assays. For ELISA binding assays of Coronavirus Spike antibodies, the antigen panel included SARS-CoV-2 Spike S1+S2 ectodomain (ECD) (SINO, Catalog #40589—V08B1), SARS-CoV-2 Spike-2P⁶², SARS-CoV-2 Spike S2 ECD (SINO, Catalog #40590—V08B), SARS-CoV-2 Spike RBD from insect cell sf9 (SINO, Catalog #40592—V08B), SARS-CoV-2 Spike RBD from mammalian cell 293 (SINO, Catalog #40592—V08H), SARS-CoV-2 Spike NTD-Biotin, SARS-CoV Spike Protein Delta™ (BEI, Catalog #NR-722), SARS-CoV WH20 Spike RBD (SINO, Catalog #40150—V08B2), SARS-CoV WH20 Spike S1 (SINO, Catalog #40150—V08B1), SARS-CoV-1 RBD, MERS-CoV Spike S1+S2 (SINO, Catalog #40069—V08B), MERS-CoV Spike S1 (SINO, Catalog #40069—V08B1), MERS-CoV Spike S2 (SINO, Catalog #40070—V08B), MERS-CoV Spike RBD (SINO, Catalog #40071—V08B1), MERS-CoV Spike RBD.

[0418] For binding ELISA, 384-well ELISA plates were coated with 2 μg/mL of antigens in 0.1 M sodium bicarbonate overnight at 4° C. Plates were washed with PBS+0.05% Tween 20 and blocked with assay diluent (PBS containing 4% (w/v) whey protein, 15% Normal Goat Serum, 0.5% Tween-20, and 0.05% Sodium Azide) at room temperature for 1 hour. Plasma or mucosal fluid were serially diluted three-fold in superblock starting at a 1:30 dilution. Nasal was fluid started from neat and diluted 1:30, whereas BAL fluid was concentrated 10-fold. To concentrate BAL, individual BAL aliquots from the same animal and same time point were pooled in 3 KDa MWCO ultrafiltration tubes (Sartorious #VS2091). Pooled BAL was concentrated by centrifugation at 3500 rpm for 30 minutes or until volume was reduced by a factor of 10. Pool was then aliquoted and frozen at −80° C. until its use in an assay. Purified mAb samples were diluted to 100 μg/mL and then serially diluted 3-fold in assay diluent. Samples were added to the antigen-coated plates, and incubated for 1 h, followed by washes with PBS-0.1% Tween 20. HRP-conjugated goat anti-human IgG secondary Ab or mouse anti-rhesus IgG secondary antibody (SouthernBiotech, catalog #2040-05) was diluted to 1:10,000 and incubated at room temperature for 1 hour. These plates were washed four times and developed with tetramethylbenzidine substrate (SureBlue Reserve—KPL). The reaction was stopped with 1 M HCl, and optical density at 450 nm (OD₄₅₀) was determined.

[0419] Subgenomic RNA real time PCR quantification. The assay for SARS-CoV-2 quantitative Polymerase Chain Reaction (qPCR) detects total RNA using the WHO primer/probe set E_Sarbeco (Charité/Berlin). A QIAsymphony SP (Qiagen, Hilden, Germany) automated sample preparation platform along with a virus/pathogen DSP midi kit and the complex800 protocol were used to extract viral RNA from 800 μL of pooled samples. A reverse primer specific to the envelope gene of SARS-CoV-2 (5′-ATA TTG CAG CAG TAC GCA CAC A-3′ (SEQ ID NO: 49)) was annealed to the extracted RNA and then reverse transcribed into cDNA using SuperScript™ III Reverse Transcriptase (Thermo Fisher Scientific, Waltham, MA) along with RNAse Out (Thermo Fisher Scientific, Waltham, MA). The resulting cDNA was treated with RNase H (Thermo Fisher Scientific, Waltham, MA) and then added to a custom 4× TaqMan™ Gene Expression Master Mix (Thermo Fisher Scientific, Waltham, MA) containing primers and a fluorescently labeled hydrolysis probe specific for the envelope gene of SARS-CoV-2 (forward primer 5′-ACA GGT ACG TTA ATA GTT AAT AGC GT-3′ (SEQ ID NO: 50), reverse primer 5′-ATA TTG CAG CAG TAC GCA CAC A-3′ (SEQ ID NO: 49), probe 5′-6FAM/AC ACT AGC C/ZEN/A TCC TTA CTG CGC TTC G/IABkFQ-3′ (SEQ ID NO: 51)). The qPCR was carried out on a QuantStudio 3 Real-Time PCR System (Thermo Fisher Scientific, Waltham, MA) using the following thermal cycler parameters: heat to 50° C., hold for 2 min, heat to 95° C., hold for 10 min, then the following parameters are repeated for 50 cycles: heat to 95° C., hold for 15 seconds, cool to 60° C. and hold for 1 minute. SARS-CoV-2 RNA copies per reaction were interpolated using quantification cycle data and a serial dilution of a highly characterized custom DNA plasmid containing the SARS-CoV-2 envelope gene sequence. Mean RNA copies per milliliter were then calculated by applying the assay dilution factor (DF=11.7). The limit of detection (LOD) for this assay is approximately 62 RNA copies per mL of sample.

[0420] Recombinant IgG production. Expi293-F cells were diluted to 2.5E6 cells/mL on the day of transfection. Cells were co-transfected with Expifectamine and heavy and light chain expression plasmids. Enhancers were added 16h after transfection. On day 5, the cell culture was cleared of cells by centrifugation, filtered, and incubated with protein A beads overnight. The next day the protein A resin was washed with Tris buffered saline and then added to a 25 mL column. The resin was washed again and then glacial acetic acid was used to elute antibody off of the protein A resin. The pH of the solution was neutralized with 1M Tris pH8. The antibody was buffer exchanged into 25 mM sodium citrate pH6 supplemented with 150 mM NaCl, 0.2 μm filtered, and frozen at −80° C.

[0421] Negative stain electron microscopy. The RBD nanoparticle protein at ˜1-5 mg/ml concentration that had been flash frozen and stored at −80° C. was thawed in an aluminum block at 37° C. for 5 minutes; then 1-4 μL of RBD nanoparticle was diluted to a final concentration of 0.1 mg/ml into room-temperature buffer containing 150 mM NaCl, 20 mM HEPES pH 7.4, 5% glycerol, and 7.5 mM glutaraldehyde. After 5 minutes cross-linking, excess glutaraldehyde was quenched by adding sufficient 1 M Tris pH 7.4 stock to give a final concentration of 75 mM Tris and incubated for 5 minutes. For negative stain, carbon-coated grids (EMS, CF300-cu-UL) were glow-discharged for 20s at 15 mA, after which a 5-μl drop of quenched sample was incubated on the grid for 10-15 s, blotted, and then stained with 2% uranyl formate. After air drying grids were imaged with a Philips EM420 electron microscope operated at 120 kV, at 82,000× magnification and images captured with a 2k×2k CCD camera at a pixel size of 4.02 Å.

[0422] Processing of negative stain images. The RELION 3.0 program was used for all negative stain image processing. Images were imported, CTF-corrected with CTFFIND, and particles were picked using a spike template from previous 2D class averages of spike alone. Extracted particle stacks were subjected to 2-3 rounds of 2D class averaging and selection to discard junk particles and background picks. Cleaned particle stacks were then subjected to 3D classification using a starting model created from a bare spike model, PDB 6vsb, low-pass filtered to 30 Å. Classes that showed clearly-defined Fabs were selected for final refinements followed by automatic filtering and B-factor sharpening with the default Relion post-processing parameters.

[0423] Betacoronavirus sequence analysis. Heatmaps of amino acid sequence similarity were computed for a representative set of betacoronaviruses using the ComplexHeatmap package in R. Briefly, 1408 betacoronavirus sequences were retrieved from NCBI Genbank, aligned to the Wuhan-1 spike protein sequence, and trimmed to the aligned region. The 1408 spike sequences were then clustered using USEARCH⁷² with a sequence identity threshold of 0.90 resulting in 52 clusters. We sampled one sequence from each cluster to generate a representative set of sequences. Five betacoronavirus sequences of interest not originally included in the clustered set were added: SARS-CoV-2, GXP4L, batCoV-RaTG13, batCoV-SHC014, batCoV-WIV-1. This resulted in a set of 57 representative spike sequences. Pairs of spike amino acid sequences were aligned using a global alignment and the BLOSUM62 scoring matrix. For RBD and NTD domain alignments, spike sequences were aligned to the Wuhan 1 spike protein RBD region (residues 330-521) and NTD region (residues 27-292), respectively, and trimmed to the aligned region. Phylogenetic tree construction of RBD sequences was performed with Geneious Prime 2020.1.2 using the Neighbor Joining method and default parameters. To map group 2b betaCoV sequence conservation onto the RBD structure, group 2b spike sequences were retrieved from Genbank and clustered using USEARCH⁷² with a sequence identity threshold of 0.99 resulting in 39 clusters. For clusters of size >5, 5 spike sequences were randomly downsampled from each cluster. The resulting set of 73 sequences was aligned using MAFFT⁷³. Conservation scores for each position in the multiple sequence alignment were calculated using the trident scoring method⁷⁴ and computed using the MstatX program (https://github.com/gcollet/MstatX). The conservation scores were then mapped to the RBD domain coordinates (PDB: 7LD1) and images rendered with PyMol version 2.3.5.

[0424] Histopathology. Lung specimen from macaques were fixed in 10% neutral-buffered formalin, processed, and blocked in paraffin for histology analyses. All tissues were sectioned at 5 μm and stained with hematoxylin-eosin (H&E) for to assess histopathology. Stained sections were evaluated by a board-certified veterinary pathologist in a blinded manner. Sections were examined under light microscopy using an Olympus BX51 microscope and photographs were taken using an Olympus DP73 camera.

[0425] Immunohistochemistry (IHC). Staining for SARS-CoV-2 nucleocapsid antigen was performed by the Bond RX automated system with the Polymer Define Detection System (Leica) following the manufacturer's protocol. Tissue sections were dewaxed with Bond Dewaxing Solution (Leica) at 72° C. for 30 min, then subsequently rehydrated with graded alcohol washes and 1× Immuno Wash (StatLab). Heat-induced epitope retrieval (HIER) was performed using Epitope Retrieval Solution 1 (Leica) and by heating the tissue section to 100° C. for 20 min. A peroxide block (Leica) was applied for 5 min to quench endogenous peroxidase activity prior to applying the SARS-CoV-2 nucleocapsid antibody (1:2000, GeneTex, GTX135357). Antibodies were diluted in Background Reducing Antibody Diluent (Agilent). The tissue was subsequently incubated with an anti-rabbit HRP polymer (Leica) and colorized with 3,3′-Diaminobenzidine (DAB) chromogen for 10 min. Slides were counterstained with hematoxylin.

[0426] Statistics Analysis. Data were plotted using Prism GraphPad 9.0. Wilcoxon rank sum exact test was performed to compare differences between groups with p-value<0.05 considered significant using SAS 9.4 (SAS Institute, Cary, NC). No adjustments were made to the p-values for multiple comparisons. IC50 and IC80 values were calculated using R statistical software (version 4.0.0; R Foundation for Statistical Computing, Vienna, Austria). The R package ‘nplr’ was used to fit 4-Parameter Logistic (4-PL) regression curves to the average values from duplicate experiments, and these fits were used to estimate the concentrations corresponding to 50% and 80% neutralization.

### Example 1B

[0427] FIG. 18, FIG. 20, FIG. 21, FIG. 22, FIG. 23 and FIG. 43, and Tables 1, 2, 3, and 5 show non-limiting embodiments of amino acid sequences of immunogens of the invention.

[0428] In some embodiments these sequences are sequence optimized as nucleic acids sequences for expression as mRNA or DNA. Immunogen designs from Table 1, Table 2 and Table 3 will be expressed, characterized and tested for antigenicity and immunogenicity. Immunogenicity studies include animal challenge studies.

[0429] In non-limiting embodiments, the goal is to identify an immunogen design that can be expressed as a protein nanoparticles displaying coronavirus, including SARS-CoV-2, viral antigens.

[0430] In non-limiting embodiments, immunogenic composition comprise viral subunits derived from the Spike (S) protein of coronaviruses arrayed on self-assembling protein nanoparticles. The S subunit will include different versions of the receptor binding domain or other neutralizing determinants on the coronavirus spike protein.

[0431] Nucleic acid sequences encoding the amino acid sequences depicted in FIG. 18, FIG. 20, FIG. 21, FIG. 22, FIG. 23 and FIG. 43 will be codon-optimized for mammalian cell expression, including without limitation for expression as modified mRNAs.

[0432] Codon-optimized DNA encoding the amino acid sequences depicted in FIG. 18, FIG. 20, FIG. 21, FIG. 22, FIG. 23 and FIG. 43 will be made for production of recombinant protein encoding the coronavirus subunit nanoparticle vaccines.

[0433] Recombinant proteins will be evaluated for expression, stability, antigenicity, and immunogenicity in any suitable assay.

[0434] The expression of subunit nanoparticles will be quantified by ELISA. Also, antigenicity of each virus subunit nanoparticles expressed by RNA or DNA will be determined by biolayer interferometry binding to ACE-2 as a positive control, NTD and S2 antibodies as negative controls, and RBD antibodies as test antibodies. Constructs with binding to RBD antibodies and ACE-2 will be ranked based on magnitude of binding. Constructs that are antigenic for RBD antibodies and ACE-2 will then be confirmed to be nanoparticles by negative stain electron microscopy. The nanoparticles that bind to RBD antibodies and form nanoparticles will be subjected to immunogenicity testing in wildtype BALB/c mice. Mouse sera will be tested for reactivity with recombinant RBD to determine whether delivery of the mRNA expressing the viral subunit nanoparticle was immunogenic. Additionally, mouse sera will be tested for the ability to inhibit ACE-2 binding to SARS-CoV-2 spike, including different spike variants circulating worldwide (e.g. UK and South African variants). Sera will be tested for various betacoronavirus neutralization in pseudovirus and live virus assays. For each assay, the different designs will be ranked and the viral subunit nanoparticle with the lowest sum of their rankings for expression, blocking of ACE-2, and neutralization potency and breadth will be selected for additional animal studies, and further product development.

### Example 2

[0435] Additional animal studies, including mouse models, rabbits, ferrets, or non-human primates (NHPs) will be conducted with any of the immunogens. Immune response is evaluated and animals are challenged with coronavirus strain, including any suitable variant.

[0436] Analyses of the animal study will include immunogenicity, levels of antibodies, types of antibodies-neutralizing or not, serum neutralization of pseudo-virus, diversity of epitopes targeted by the induced antibodies, protection after challenge with virus, and any other suitable assay. Non-limiting embodiments of assays that could be used to characterize the immunogens of the invention are used and described in Examples 1 and 3.

[0437] Any suitable mouse model could be used, including without limitation humanized mouse models to determine the types of immune responses and antibodies induced by the immunogens of the invention.

### Example 3: Breadth of SARS-CoV-2 Neutralization and Protection Induced by a Nanoparticle Vaccine

[0438] Coronavirus vaccines that are highly effective against SARS-CoV-2 variants are needed to control the current pandemic. We previously reported a receptor-binding domain (RBD) sortase A-conjugated ferritin nanoparticle (RBD-scNP) vaccine that induced neutralizing antibodies against SARS-CoV-2 and pre-emergent sarbecoviruses and protected monkeys from SARS-CoV-2 WA-1 infection. Here, we demonstrate SARS-CoV-2 RBD-scNP immunization induces potent neutralizing antibodies against eight SARS-CoV-2 variants tested including the Beta, Delta, and Omicron variants in non-human primates (NHPs). The Omicron variant was neutralized by RBD-scNP-induced serum antibodies with a 3 to 9-fold reduction of ID80 titers compared to SARS-CoV-2 D614G. Immunization with RBD-scNPs protected NHPs from SARS-CoV-2 WA-1, Beta and Delta variants challenge, and protected mice from challenges of SARS-CoV-2 Beta variant and two other heterologous Sarbecoviruses. These results demonstrate the ability of RBD-scNPs to induce broad neutralization of SARS-CoV-2 variants and to protect NHPs or mice from multiple different SARS-related viruses. Such a vaccine could provide the needed immunity to slow the spread of and reduce disease caused by SARS-CoV-2 variants such as Delta and Omicron.

[0439] Despite the remarkable success of the approved COVID-19 vaccines, additional broadly protective vaccines may be needed to combat breakthrough infections caused by emerging SARS-CoV-2 variants and waning immunity. Moreover, pan-Sarbecovirus vaccines are needed for the prevention of new animal SARS-like viruses that may jump to humans in the future¹. Modified mRNA vaccines encapsulated in lipid nanoparticles (LNPs) have proved transformative for COVID-19 vaccine development and for vaccine development in general²⁻⁴. Developed in 11 months and providing >90% efficacy from transmission, the mRNA-1273 and the BNT162b2 COVID-1 vaccines, while showing the most reduction in efficacy from SARS-CoV-2 Beta and Omicron variants, continue to provide significant protection from serious COVID-19 disease, hospitalization, and death⁵⁷. The Omicron variant, however, has proved to be more transmissible than previous variants, now accounting for the majority of global isolates⁸. Arising from immunocompromised individuals in South Africa, the Omicron variant spike protein contains 30 mutations compared to the WA-1 strain, and continues to evolve⁹. While less pathogenic than Delta and other SARS-CoV-2 variants, the enhanced transmissibility of Omicron, coupled with the sheer number of resulting cases, has resulted in a higher absolute number of COVID patients compared to previous variant infections, thus providing a continued burden on global health care systems.

[0440] We have previously reported an RBD-based, sortase A-conjugated nanoparticle (RBD-scNP) vaccine formulated in the TLR7/8 agonist 3M-052-aqueous formulation (AF) (hereafter 3M-052-AF) plus Alum, that elicited cross-neutralizing antibody responses against SARS-CoV-2 and other sarbecoviruses, and protected against the WA-1 SARS-CoV-2 strain in non-human primates (NHPs)¹⁰. Here, we found RBD-scNPs induced antibodies that neutralized all variants tested including Beta and Omicron, and protected against Beta and Delta variant challenges in macaques. Moreover, RBD-scNP immunization protected in highly susceptible aged mouse models against challenges of SARS-CoV-2 Beta variant and other betacoronaviruses. In addition, while Alum, 3M-052-AF, or 3M-052-AF+Alum as adjuvant for RBD-scNP, each protected animals from WA-1 challenge, the 3M-052-AF/RBD-scNP formulation was optimal for induction of neutralization titers to variants and protection from lung inflammation. Finally, we found that RBD-, N-terminal domain (NTD)- and spike-2P (S2P)-scNPs each protected comparably in the upper and lower airways from WA-1, but boosting with the NTD-scNP protected less well than RBD- or S2P-scNP.

[0441] RBD-scNPs induce neutralizing antibodies against SARS-CoV-2 B.1.1.529 (Omicron) and other variants. RBD-scNPs were used to immunize macaques X3 four weeks apart (FIG. 28a). To test whether RBD-scNP-induced antibodies can neutralize SARS-CoV-2 variants, we collected macaque plasma samples two weeks after the 3^{rd} RBD-scNP immunization¹⁰ and assessed its ability to neutralize pseudovirus infection of 293T-ACE2-TMPRSS2 cells by SARS-CoV-2 WA-1 and 8 variants (FIG. 28a). RBD-scNP induced potent plasma neutralizing antibodies against the WA-1 strain with average ID50 titer of 12,266.7, while reduced ID50 titers were observed to different extents for the variants (FIG. 28b-c). For example, the highest reduction of neutralizing activities was observed in the B.1.351 (Beta) variant, ranged from 4.1- to 10.2-fold (FIG. 28c). We then asked if the B.1.1.529 (Omicron) variant could escape RBD-scNP-induced neutralizing antibodies. In a pseudovirus assay in 293T-ACE2 cells, monkey serum antibodies induced by three doses of RBD-scNP immunization¹⁰ neutralized both the D614G (ID₅₀=16,531, ID80=5,484) and Omicron (ID₅₀=3,858, ID₈₀=980) pseudoviruses. A 4.3-fold drop in the average ID₅₀ titer and 5.5-fold drop in the average ID₈₀ titer were observed (FIG. 28d). Thus, high titers of neutralizing antibodies against SARS-CoV-2 variants, including Omicron, were elicited by the RBD-scNP immunization in macaques.

[0442] RBD-scNPs induced higher titers of neutralizing antibodies than soluble RBD. Next, we asked if two doses of RBD-scNP vaccination could protect NHPs from challenge by SARS-CoV-2 WA-1, Beta or Delta variants. We immunized cynomolgus macaques with two doses of RBD-scNP vaccine, PBS, or adjuvant alone (FIG. 29a). One group of macaques received soluble RBD for comparison to RBD-scNP immunization. RBD-scNP and soluble RBD monomer immunization elicited similar titers of antibodies binding to SARS-CoV-2 and other CoV spike antigens (FIG. 34a), which also similarly blocked ACE2-binding on SARS-CoV-2 spike and bat CoV RsSHC014 spike (FIG. 34b-c). RBD-scNPs and soluble RBD induced similar levels of antibodies targeting the Sarbecovirus cross-neutralizing DH0147-epitope¹¹⁻¹³ on SARS-CoV-2 spike as well as on RsSHC014 spike (FIG. 34b-c). In pseudovirus neutralization assays, the RBD-scNP group exhibited higher titers of neutralizing antibodies than the soluble RBD group against the WA-1, Alpha, Epsilon, Iota, and Delta viruses, with comparable neutralizing titers against Beta, Gamma, and Kappa variants (FIG. 34d). In both groups, reduced neutralizing titers compared to WA-1 were seen for the Beta, Gamma, and Iota variants (FIG. 34e). Thus, RBD-scNP induced higher neutralizing antibodies than soluble RBD monomer for 5 out of 8 SARS-CoV-2 variant pseudoviruses we tested.

[0443] RBD-scNPs protected macaques from SARS-CoV-2 WA-1, Beta and Delta challenge. Two weeks after the second vaccination, macaques were challenged with SARS-CoV-2 WA-1 (n=5 per group), SARS-CoV-2 B.1.351 (Beta) variant (n=5 per group), or SARS-CoV-2 B.1.617.2 (Delta) variant (n=5 per group) (FIG. 29a). In the PBS or adjuvant alone group, high copies of envelope (E) and nucleocapsid (N) gene subgenomic RNA (sgRNA) were detected in both BAL and nasal swab samples collected on day 2 and 4 post-challenge (FIG. 29b-d). By contrast, 5 of 5 animals in the RBD-scNP group, and 4 of 5 animals in the soluble RBD group, were completely protected from the WA-1 strain infection, as indicated by no detectable sgRNA in BAL or nasal swab (FIG. 29b). After the SARS-CoV-2 Beta variant challenge, nasal N gene sgRNA was detected in only ⅕ of the RBD-scNP immunized monkeys but in 4 of 5 of the soluble RBD immunized monkeys (FIG. 29c). In addition, after the SARS-CoV-2 Delta variant challenge, all animals that received two doses of RBD-scNP immunization showed no detectable sgRNA in BAL or nasal swab samples (FIG. 29d).

[0444] Animals were necropsied 4 days after challenge for histopathologic analysis to determine SARS-CoV-2-associated lung inflammation. After WA-1 and Beta variant challenge, lung tissue Haematoxylin and eosin (H&E) staining revealed no difference between groups (FIG. 29e-f). However, immunohistochemistry (IHC) staining showed the presence of SARS-CoV-2 nucleocapsid antigen in the lungs of macaques administered PBS or adjuvant alone, but not in the lungs of RBD-scNP or soluble RBD immunized monkeys (FIG. 29e-f). Thus, while lung inflammation was observed in immunized macaques, two doses of RBD-scNP immunization protected against viral replication of WA-1, the Beta variant, or Delta variant in both lower and upper airways. In addition, RBD-scNP was superior to soluble RBD in terms of protecting from the hard-to-neutralize Beta variant infection in the upper respiratory tract.

[0445] RBD-scNPs induce protective responses in mice against SARS-CoV-2 Beta variant and other betacoronaviruses. To define the protective efficacy of the RBD-scNP vaccination against different betacoronaviruses, we immunized aged mice with two doses of RBD-scNPs, challenged the mice with mouse-adapted SARS-CoV-2 WA-1, SARS-CoV-2 Beta variant, SARS-CoV-1 or a bat CoV RsSHC014. In the SARS-CoV-2 WA-1 challenge study, RBD-scNP protected mice from weight loss through 4 dpi (FIG. 30a) and protected from viral replication in lungs (FIG. 30b). Similar protection from weight loss and lung viral replication were observed in the SARS-CoV-2 Beta variant challenged mice (FIG. 30c-d). Mice immunized with RBD-scNP were also protected against weight loss induced by SARS-CoV-1 (FIG. 30e) and showed ˜3-log lower average PFU titer in lungs compared to adjuvant alone and unimmunized groups (FIG. 30f). Lastly, RBD-scNP immunization conferred protection against RSHC014 challenge-induced weight loss (FIG. 3g) and resulted in ˜2-log lower average PFU titer than unimmunized animals (FIG. 30h). Thus, two doses of RBD-scNP immunization elicited protective immune responses against SARS-CoV-2 Beta variant and other betacoronaviruses in aged mouse models.

[0446] Adjuvant is required for RBD-scNP induction of potent plasma and mucosal antibody responses. To optimize adjuvant formulations for the RBD-scNP vaccine, we next formulated the RBD-scNP immunogen with the TLR7/8 agonist 3M-052-AF alone, with Aluminum hydroxide (Alum) alone, or with the original formulation of 3M-052-AF adsorbed to Alum (3M-052-AF+Alum). Control groups included NHPs immunized with immunogen alone (RBD-scNP without adjuvant), adjuvant alone (3M-052-AF, Alum, or 3M-052-AF+Alum without immunogen), or PBS alone (FIG. 31a). After three immunizations, RBD-scNP alone without adjuvant induced minimal binding antibodies to SARS-CoV-2 and other CoV spike antigens, whereas higher titers of binding antibodies were induced by RBD-scNP formulated with each adjuvant formulation (FIG. 35a). While all three adjuvant formulations were highly immunogenic, RBD-scNP adjuvanted with 3M-052-AF induced the highest DH1047-blocking plasma antibodies (p<0.05; Wilcoxon rank sum exact test; FIG. 35b-c). Mucosal antibody levels tended to be comparable for macaques who received RBD-scNP formulated with 3M-052-AF or 3M-052+Alum, with only low titers being seen when Alum was used to adjuvant the RBD-scNP (FIG. 35d-e).

[0447] Robust neutralizing antibodies and in vivo protection induced by adjuvanted RBD-scNP. In SARS-CoV-2 pseudovirus assay, while the RBD-scNP alone group showed minimal neutralizing antibody titers, the RBD-scNP+3M-052-AF group induced antibodies showed highest neutralizing antibody titers against SARS-CoV-2 WA-1 strain, with average neutralization titers (ID₅₀) of 59,497. The average neutralization titers of RBD-scNP+3M-052-Alum and RBD-scNP+Alum groups against WA-1 were 12,267 and 12,610, respectively (FIG. 31b). Similarly, RBD-scNP+3M-052-AF immunized animals exhibited the highest magnitudes of neutralizing antibodies against each variant we tested (FIG. 31b). The neutralization titers of all three RBD-scNP+adjuvant groups decreased by 2.3- to 10.2-fold against the Beta variant and decreased by 1.9- to 8.6-fold against the Gamma variant (FIG. 31c). RBD-scNP immunization elicited predominately T helper 1 (TH1)-biased cellular immune responses¹⁴ (FIG. 37f). NHPs that received RBD-scNP also showed IFN-γ-, IL-2- and TNF-α-secreting CD8+ T cell responses (FIG. 37g).

[0448] To compare in vivo protection of RBD-scNP with different adjuvant formulations, cynomolgus macaques were challenged with the WA-1 strain of SARS-CoV-2 three weeks after the third immunization (FIG. 31a). Compared to unimmunized monkeys, the adjuvant alone groups exhibited similar or higher levels of E and N sgRNA, and the RBD-scNP immunogen alone reduced sgRNA copies by only ˜1-2 logs (FIG. 31d-e), demonstrating that adjuvant was required for eliciting potent protection from SARS-CoV-2 challenge. Immunization with RBD-scNP adjuvanted with 3M-052-AF+Alum or 3M-052-AF conferred robust protection against SARS-CoV-2 infection, showing under-detection-limit or near-baseline sgRNA N and E in both lower and upper respiratory tracts, whereas 1 of 5 of the RBD-scNP+Alum immunized animals showed positive E gene sgRNA and 2/5 animals showed positive N gene sgRNA in BAL samples collected on day 2 post-challenge. All RBD-scNP adjuvanted groups showed no detectable sgRNA by day 4 post-challenge (FIG. 31d-e).

[0449] Histologic analysis of lung tissue showed that the RBD-scNP+3M-052-AF group had significantly lower inflammation scores than the 3M-052-AF alone group (p=0.0079, exact Wilcoxon test), whereas no significant difference was observed across other groups (FIG. 31f). IHC staining of the lung tissues exhibited high SARS-CoV-2 nucleocapsid antigen expression in the unimmunized and adjuvant alone groups. By contrast, 1 of 5 of the RBD-scNP+Alum immunized animals and 2 of 5 of the immunogen alone immunized animals had low level nucleocapsid antigen expression, and no viral antigen was detected in the RBD-scNP plus 3M-052-AF+Alum or RBD-scNP plus 3M-052-AF immunized animals (FIG. 31f). Therefore, the three adjuvants conferred comparable protection against viral replication by day 4 post-challenge, but 3M-052-AF-adjuvanted RBD-scNP protected animals better against SARS-CoV-2-associated lung inflammation.

[0450] RBD-scNP and S2P-scNP induced both ADCC-mediating and neutralizing antibodies. While 90% of neutralizing antibodies target the RBD, neutralizing antibodies can target other sites on Spike. Thus, we generated scNPs with NTD and S-2P and compared the antibody response elicited by these ferritin nanoparticles to RBD-scNPs (FIG. 32a,b). Cynomolgus macaques were immunized three times with one of the scNPs formulated with 3M-052-AF+Alum. After three immunizations, binding and blocking antibodies were observed in all three groups (FIG. 36a-b). In the RBD-scNP and S2P-scNP immunized animals, neutralizing antibodies against SARS-CoV-2 D614G pseudovirus were detected after the first dose and were boosted after the second dose at week 6 (FIG. 32c). However, NTD-scNP failed to elicit neutralizing antibodies against pseudovirus or live SARS-CoV-2 virus (FIG. 32c-d). Importantly, S2P-scNP induced comparable plasma neutralizing antibody titers with RBD-scNP against SARS-CoV-2 WA-1 strain and all eight variants we tested (p>0.05; Wilcoxon rank sum exact test; FIG. 32e) indicating the RBD was the main domain eliciting neutralizing antibodies. Among the different variants, the Beta variant showed the largest reduction in neutralization ID₅₀ titer (5.0- to 10.9-fold) (FIG. 32f). To examine other antibody functions, we examined plasma antibody binding to cell surface-expressed SARS-CoV-2 spike and antibody-dependent cellular cytotoxicity (ADCC). Plasma antibodies induced by three doses of RBD-scNP, NTD-scNP and S2P-scNP vaccination bound to SARS-CoV-2 spike on the surface of transfected cells (FIG. 36d). In a CD107a degranulation ADCC assay (FIG. 36e), plasma antibodies from all three scNP groups mediated CD107a degranulation of human NK cells in the presence of both SARS-CoV-2 spike-transfected cells and SARS-CoV-2-infected cells (FIG. 36f). Thus, all three groups had ADCC antibodies, only RBD-scNP- and S2P-scNP-immunized groups also generated neutralizing antibodies.

[0451] RBD-scNP, NTD-scNP, and S2P-scNP vaccines protected macaques against SARS-CoV-2 WA-1 challenge. To determine whether NTD-scNP- and S2P-scNP immunization conferred protection against SARS-CoV-2, we challenged the macaques with SARS-CoV-2 WA-1 strain via the intratracheal and intranasal routes after the 3^{rd} vaccination. Remarkably, all macaques received RBD-scNP, NTD-scNP or S2P-scNP were fully protected, showing undetectable or near-detection-limit E or N gene sgRNA (FIG. 32g-h). IHC staining of the lung tissues demonstrated high SARS-CoV-2 nucleocapsid protein expression in the control animals, whereas no viral NC antigen was detected in any of the scNP-immunized animals (FIG. 32i). The sgRNA and histopathology data demonstrated that three doses of NTD-scNP or S2P-scNP immunization provided the same in vivo protection as RBD-scNP immunization, preventing SARS-CoV-2 infection in both lower and upper respiratory tracts. That the NTD-scNP group had no or minimal serum neutralizing activity but did have ADCC activity, indicated that non-neutralizing Fc receptor-mediated antibody activities or T cells could have been involved in protection.

[0452] RBD-scNP, NTD-scNP and S2P-scNP as boosts for mRNA-LNP vaccine elicited various neutralizing antibody responses. We next accessed the efficacy of the RBD-scNP, NTD-scNP and S2P-scNP as boosts in animals that received two doses of mRNA vaccine. Cynomolgus macaques (n=5) were immunized twice with 50 μg of S-2P-encoding, nucleoside-modified mRNA encapsulated in lipid nanoparticles (S-2P mRNA-LNP), which phenocopies the Pfizer/BioNTech and the Modema COVID-19 vaccines. Animals were then injected with a heterologous boost with RBD-, NTD- or S2P-scNPs (FIG. 33a). Plasma antibody binding patterns were similar among the three groups until animals received the scNP boosting (FIG. 37a). Plasma antibodies targeting to ACE2-binding site and neutralizing epitopes were detected after the scNP boosting with cross-reactive antibodies in the DH1047 blocking assay highest after RBD-scNP_and S2P-NP boosting (FIG. 37b-c). BAL and nasal wash mucosal ACE2-blocking and DH1047-blocking activities were highest in RBD-scNP×3 and S2P-scNP×3 groups with trends of higher values in the RBD-scNP group (FIG. 37d-e).

[0453] Serum neutralizing titers against the WA-1 strain pseudovirus were similar in the RBD-scNP-boosted group (average ID₅₀=10,912.1) and S2P-scNP-boosted group (average ID₅₀=7799.9) (FIG. 33b), while the NTD-scNP-boosted group showed significant lower titers (average ID₅₀=3229.8; p=0.027, exact Wilcoxon test). The same differences were also observed in other major variants (FIG. 33b). In addition, in the RBD-scNP- and S2P-scNP-boosted groups, reduced ID₅₀ titers were mostly seen for the Beta and Gamma variants, whereas in the NTD-scNP-boosted group, Alpha, Beta, Gamma, Delta, Iota and Kappa variants all showed >5-fold reduction of ID₅₀ titers (FIG. 33c).

[0454] Protection of mRNA-LNP-primed and scNP-boosted macaques from SARS-CoV-2 challenge. Macaques that received mRNA-LNP prime and scNP boost were challenged with SARS-CoV-2 WA-1 strain after the RBD-scNP, NTD-scNP or S2P-scNP boosting. Four of five RBD-scNP-boosted monkeys and Four of five of the S2P-scNP-boosted monkeys were completely protected from SARS-CoV-2 infection, showing no detectable E or N gene sgRNA in BAL or nasal swab samples (FIG. 33d-e). However, NTD-scNP-boosted animals were not as well protected; in the NTD-scNP boost group, N gene sgRNA was detected in BAL from three of five animals and in nasal swab samples from two of five animals (FIG. 33d-e). Macaques that received mRNA-LNP prime and RBD-scNP boost had the lowest extent of lung inflammation, although it was not significantly lower (FIG. 33f). In addition, no viral antigen was observed in lung tissues from the immunized groups as indicated by IHC staining for SARS-CoV-2 N protein (FIG. 33f). These data demonstrated that animals received mRNA-LNP-prime and scNP-boost regimens were not as well protected as those received three doses of RBD-scNP, NTD-scNP or S2P-scNP vaccination.

[0455] In this Example, we demonstrated that the RBD-scNP induced antibodies that neutralize SARS-CoV-2 variants including Beta, Delta and Omicron, and as well, protected against Beta and Delta variants in NHPs. When the individual components of 3M-052/Alum adjuvant were studied for optimal formulation of RBD-scNPs, we found 3M-052-AF alone plus RBD-scNP was optimal. Finally, NTD- and S2P-scNPs protected NHPs from WA-1 challenge as well as RBD-NPs, but NTD-scNPs were less effective as a boosting immunogen in protecting NHPs compared to RBD- or S2P-scNPs.

[0456] Several protein-based SARS-CoV-2 vaccines have been designed as VLPs¹⁵, RBD monomers¹⁶, dimers¹⁷ or trimers¹⁸ as well as multimeric nanoparticles^{19,20}. In our previous study, we demonstrated that RBD multimerized on sortase A-conjugated ferritin nanoparticles is a promising vaccine platform for SARS-CoV-2 and other Sarbecoviruses¹⁰. Although the currently approved mRNA and viral vectored vaccines showed high efficacy against hospitalization and death of current SARS-CoV-2 variants^{5,7,21-35}, it is important to develop new vaccines to combat any new variants that might emerge. Ferritin nanoparticle-based Influenza vaccines have been demonstrated to be safe and immunogenic in animal models³⁶ and have been tested in clinical trials (NCT03186781, NCT03814720). We and others have shown that RBD-ferritin nanoparticle vaccines elicited high-titer neutralizing antibodies and conferred potent in vivo protection against SARS-CoV-2 challenge^{10,37-40}. Here, we engineered RBD, NTD and S2P on scNP and compared their capacities to elicit neutralizing antibodies and protect against SARS-CoV-2 WA-1 strain challenge in cynomolgus macaques, given as homologous immunization for 3 doses, or as a 3^{rd} dose heterologous boost for the S-2P mRNA-LNP vaccine. We also demonstrated the success of two-doses of RBD-scNP vaccine in the setting of protecting macaques from SARS-CoV-2 WA-1, Beta variant and Delta variant challenge.

[0457] SARS-CoV-2 vaccine-induced neutralizing antibody activity is associated with vaccine protection against COVID-19 in non-human primates and humans⁴¹⁻⁴⁷. The Novavax NVX-CoV2373 adjuvanted virus-like particle vaccine that contains a full-length spike and transmembrane domain, has demonstrated an efficacy of 89.7% against SARS-CoV-2 infection in clinical trials⁴⁸⁻⁵⁰. While the RBD subunit has been shown to protect against SARS-CoV-2 challenge in animal models^{10,16,17,51,52}, the NTD is also an immunodominant region for neutralizing antibodies^{11,32,53-55} However, NTD is the site of multiple mutation and NTD antibody neutralization is less potent than RBD antibodies. Here, no or minimal neutralizing antibody was detected in NTD-scNP vaccinated monkeys, yet they were fully protected from WA-1 challenge. Without wishing to be bound by theory, the non-neutralizing antibodies induced by NTD-scNP played essential roles in the protection against SARS-CoV-2. Recent studies in SARS-CoV-2 mouse models demonstrated that Fc effector functions contribute to the protective activity of SARS-CoV-2 neutralizing antibodies⁵⁶⁻⁵⁸. In this regard, we previously found that a non-neutralizing NTD antibody DH1052 provided partial protection in mice and non-human primates¹¹. Moreover, we found that whereas RBD-scNP and S2P-scNP after boosting S2P mRNA-LNPs both protected completely monkeys after WA-1 challenge, NTD-scNP boosting of S2P mRNA-LNPs led to incomplete protection. The mechanism of this finding is currently under investigation.

[0458] Adjuvants play essential roles in vaccine formulation to elicit strong protective immune responses⁵⁹ and Alum is used in many currently approved vaccines⁶⁰. Thus, it was encouraging to see that the RBD-NP vaccine was protective in NHPs when adsorbed to Alum. Compared to Alum, 3M-052-AF+Alum demonstrated superior capacities to elicit neutralizing antibodies against SARS-CoV-2 WA-1 live virus when formulated with SARS-CoV-2 RBD trimer in mice but not in rhesus macaques¹⁸. In addition, 3M-052-adjuvanted gp140 Env vaccine augmented neutralizing antibodies against tier 1A HIV-1 pseudovirus in rhesus macaques⁶¹. 3M-052-AF and 3M-052-AF+Alum are both in clinical testing for HIV-1 vaccines (NCT04915768 and NCT04177355). Here we found that 3M-052-AF-adjuvanted vaccine induced not only superior systemic and mucosal antibody responses, but also higher titers of neutralizing antibodies than 3M-052-AF+Alum-adjuvanted vaccine, demonstrating that 3M-052-AF in the absence of Alum is an optimal adjuvant for scNP. One explanation for this difference could be while 3M-052 provokes a strong Th1 response⁶², Alum is a Th2-response stimulator⁶³. Coronavirus vaccines formulated with Alum have been reported to be associated with enhanced lung inflammation, for example with killed vaccines^{64,65}. However, it is important to note that no enhancement of lung inflammation or virus replication was seen with RBD-scNP/Alum formulations. The RBD-scNP+3M-052-AF group exhibited the highest neutralizing antibody titers and was the only group showing reduced severity of lung inflammation.

[0459] This study did not evaluate the durability of vaccine-induced immune responses and protection against SARS-CoV-2 variants. Second, we did not set up longer time intervals between the second and the third booster vaccination, to mimic 4-6 month boosting interval in humans. Lastly, we challenged the animals with WA-1 strain, the Beta variant and the Delta variant; future in vivo protection studies will be required upon availability of viral stocks of other SARS-CoV-2 variants such as the Omicron variant.

[0460] Thus, our study showed that scNP vaccines with SARS-CoV-2 spike or spike subunits conferred potent protection for WA-1, Beta and Delta variants in NHPs and induced neutralizing antibodies to all SARS-CoV-2 variants tested in vitro. These findings have important implications for development of the next generation of COVID-19 vaccines.

### Materials and Methods

### Animals and Immunizations

[0461] The study protocol and all veterinarian procedures were approved by the Bioqual IACUC per a memorandum of understanding with the Duke IACUC, and were performed based on standard operating procedures. Macaques studied were housed and maintained in an Association for Assessment and Accreditation of Laboratory Animal Care-accredited institution in accordance with the principles of the National Institutes of Health. All studies were carried out in strict accordance with the recommendations in the Guide for the Care and Use of Laboratory Animals of the National Institutes of Health in BIOQUAL (Rockville, MD). BIOQUAL is fully accredited by AAALAC and through OLAW, Assurance Number A-3086. All physical procedures associated with this work were done under anesthesia to minimize pain and distress in accordance with the recommendations of the Weatherall report, “The use of non-human primates in research.” Teklad 5038 Primate Diet was provided once daily by animal size and weight. The diet was supplemented with fresh fruit and vegetables. Fresh water was given ad libitum. All monkeys were maintained in accordance with the Guide for the Care and Use of Laboratory Animals.

[0462] Cynomolgus macaques were on average 8-9 years old and ranged from 2.75 to 8 kg in body weight. Male and female macaques per group were balanced when availability permitted. Studies were performed unblinded. The RBD-scNP, NTD-scNP and S2P-scNP immunogens were formulated with adjuvants as previously described⁶⁶ and given intramuscularly in the right and left quadriceps. In the first study, cynomolgus macaques (n=5) were immunized for three times with 100 μg of RBD-scNP, NTD-scNP and S2P-scNP adjuvanted with 5 μg of 3M-052 aqueous formulation admixed with 500 μg of alum in PBS. In the second study, cynomolgus macaques (n=5) were immunized twice with 50 μg of S-2P mRNA-LNP (encoding the transmembrane spike protein stabilized with K986P and V987P mutations) and boosted once with 100 μg of RBD-scNP, NTD-scNP and S2P-scNP adjuvanted with 5 μg of 3M-052 aqueous formulation admixed with 500 μg of alum in PBS. In the third study, cynomolgus macaques were immunized for twice with 100 μg of RBD-scNP or recombinant soluble RBD with 5 μg of 3M-052 aqueous formulation admixed with 500 μg of alum in PBS. In the fourth study, macaques were divided into 8 groups (n=5 per group) as following: 1) control group: no immunization; 2) immunogen alone group: 100 μg of RBD-scNP; 3) RBD-scNP+3M-052-Alum group: 100 μg of RBD-scNP+5 μg of 3M-052 in aqueous formulation+500 μg of Alum (i.e. aluminum ion); 4) 3M-052-Alum alone group: 5 μg of 3M-052 in aqueous formulation+500 μg of Alum; 5) RBD-scNP+Alum group: 100 μg of RBD-scNP+500 μg of Alum; 6) Alum alone group: 500 μg of Alum; 7) RBD-scNP+3M-052-AF group: 100 μg of RBD-scNP+5 μg of 3M-052 in aqueous formulation; 8) 3M-052-AF alone group: 5 μg of 3M-052 in aqueous formulation.

### SARS-CoV-2 Viral Challenge

[0463] For SARS-CoV-2 challenge, 10⁵ plaque-forming units (PFU) of SARS-CoV-2 virus Isolate USA-WA1/2020 (˜10⁶ TCID50) were diluted in 4 mL and were given by 1 mL intranasally and 3 mL intratracheally on Day 0. Biospecimens, including nasal swabs, BAL, plasma, and serum samples, were collected before immunization, after every immunization, before challenge, 2 days post-challenge and 4 days post-challenge. Animals were necropsied on Day 4 post-challenge, and lungs were collected for histopathology and immunohistochemistry (IHC) analysis.

### Recombinant Protein Production

[0464] The coronavirus ectodomain proteins were produced and purified as previously described^{10,11,67,68}. S-2P was stabilized by the introduction of 2 prolines at amino acid positions 986 and 987. Plasmids encoding SARS-CoV-2 and other coronavirus S-2P (Genscript) were transiently transfected in FreeStyle 293 cells (Thermo Fisher) using Turbo293 (SpeedBiosystems) or 293Fectin (ThermoFisher). All cells were tested monthly for mycoplasma. The constructs contained an HRV 3C-cleavable C-terminal twinStrepTagII-8×His tag (SEQ ID NO: 17). On day 6, cell-free culture supernatant was generated by centrifugation of the culture and filtering through a 0.8-μm filter. Protein was purified from filtered cell culture supernatants by StrepTactin resin (IBA) and by size-exclusion chromatography using Superose 6 column (GE Healthcare) in 10 mM Tris pH8,150 mM NaCl or 2 mM Tris pH 8, 200 mM NaCl, 0.02% NaN₃. ACE2-Fc was expressed by transient transfection of Freestyle 293-F cells. ACE2-Fc was purified from cell culture supernatant by HiTrap protein A column chromatography and Superdex200 size-exclusion chromatography in 10 mM Tris pH8,150 mM NaCl. SARS-CoV-2 RBD and NTD were produced as previously described^{10,68}.

[0465] RBD-scNP, NTD-scNP, and S2P-scNP were produced by conjugating SARS-CoV-2 RBD to H. pylori ferritin nanoparticles using Sortase A as previously described¹⁰. Briefly, SARS-CoV-2 Wuhan strain RBD, NTD or S-2P (with a C-terminal foldon trimerization motif) was expressed with a sortase A donor sequence LPETGG (SEQ ID NO: 16) encoded at its C terminus. C-terminal to the sortase A donor sequence was an HRV-3C cleavage site, 8×His tag (SEQ ID NO: 17) and a twin StrepTagII (IBA). The proteins were expressed in Freestyle 293 cells and purified by StrepTactin affinity chromatography and Superdex 200 size-exclusion chromatography. Helicobacter pylori ferritin particles were expressed with a pentaglycine sortase A acceptor sequence encoded at its N terminus of each subunit. For affinity purification of ferritin particles, 6×His tags (SEQ ID NO: 48) were appended C-terminal to a HRV3C cleavage site. Ferritin particles with a sortase A N-terminal tag were buffer exchanged into 50 mM Tris, 150 mM NaCl, 5 mM CaCl₂), pH 7.5. Then 180 μM SARS-CoV-2 RBD was mixed with 120 μM of ferritin subunits and incubated with 100 μM of sortase A overnight at room temperature. Following incubation, conjugated particles were isolated from free ferritin or free RBD/NTD/S-2P by size-exclusion chromatography using a Superose 6 16/60 column.

### Antibody Binding ELISA

[0466] For binding ELISA, 384-well ELISA plates were coated with 2 μg/mL of antigens in 0.1 M sodium bicarbonate overnight at 4° C. Plates were washed with PBS+0.05% Tween 20 and blocked with blocked with assay diluent (PBS containing 4% (w/v) whey protein, 15% Normal Goat Serum, 0.5% Tween-20, and 0.05% Sodium Azide) at room temperature for 1 hour. Plasma or mucosal fluid were serially diluted threefold in superblock starting at a 1:30 dilution. Nasal fluid was started from neat, whereas BAL fluid was concentrated ten-fold. To concentrate BAL, individual BAL aliquots from the same macaque and same time point were pooled in 3-kDa MWCO ultrafiltration tubes (Sartorious, catalog #VS2091). Pooled BAL was concentrated by centrifugation at 3,500 rpm for 30 min or until volume was reduced by a factor of 10. The pool was then aliquoted and frozen at −80° C. until its use in an assay. Serially diluted samples were added and incubated for 1 hour, followed by washing with PBS-0.1% Tween 20. HRP-conjugated goat anti-human IgG secondary Ab (SouthernBiotech, catalog #2040-05) was diluted to 1:10,000 and incubated at room temperature for 1 hour. These plates were washed four times and developed with tetramethylbenzidine substrate (SureBlue Reserve—KPL). The reaction was stopped with 1 M HCl, and optical density at 450 nm (OD₄₅₀) was determined.

### ACE2 and Neutralizing Antibody Blocking Assay

[0467] ELISA plates were coated as stated herein with 2 μg/mL recombinant ACE-2 protein or neutralizing antibodies, then washed and blocked with 3% BSA in 1×PBS. While assay plates blocked, plasma or mucosal samples were diluted as stated herein, only in 1% BSA with 0.05% Tween-20. In a separate dilution plate spike-2P protein was mixed with the antibodies at a final concentration equal to the EC50 at which spike binds to ACE-2 protein. The mixture was incubated at room temperature for 1 hour. Blocked assay plates were then washed and the antibody-spike mixture was added to the assay plates for a period of 1 hour at room temperature. Plates were washed and a polyclonal rabbit serum against the same spike protein (nCoV-1 nCoV-2P.293F) was added for 1 hour, washed and detected with goat anti rabbit-HRP (Abcam catalog #ab97080) followed by TMB substrate. The extent to which antibodies were able to block the binding spike protein to ACE-2 or neutralizing antibodies was determined by comparing the OD of antibody samples at 450 nm to the OD of samples containing spike protein only with no antibody. The following formula was used to calculate percent blocking: blocking %=(100−(OD sample/OD of spike only)*100).

### Pseudo-Typed SARS-CoV-2 Neutralization Assay

[0468] Neutralization of SARS-CoV-2 Spike-pseudotyped virus was performed by adopting an infection assay described previously⁶⁹ with lentiviral vectors and infection in 293T/ACE2.MF (the cell line was kindly provided by Drs. Mike Farzan and Huihui Mu at Scripps). Cells were maintained in DMEM containing 10% FBS and 50 μg/ml gentamicin. An expression plasmid encoding codon-optimized full-length spike of the Wuhan-1 strain (VRC7480), was provided by Drs. Barney Graham and Kizzmekia Corbett at the Vaccine Research Center, National Institutes of Health (USA). The D614G mutation was introduced into VRC7480 by site-directed mutagenesis using the QuikChange Lightning Site-Directed Mutagenesis Kit from Agilent Technologies (Catalog #210518). The mutation was confirmed by full-length spike gene sequencing. Pseudovirions were produced in HEK 293T/17 cells (ATCC cat. no. CRL-11268) by transfection using Fugene 6 (Promega, Catalog #E2692). Pseudovirions for 293T/ACE2 infection were produced by co-transfection with a lentiviral backbone (pCMV ΔR8.2) and firefly luciferase reporter gene (pHR′ CMV Luc)⁷⁰. Culture supernatants from transfections were clarified of cells by low-speed centrifugation and filtration (0.45 μm filter) and stored in 1 ml aliquots at −80° C. A pre-titrated dose of virus was incubated with 8 serial 3-fold or 5-fold dilutions of mAbs in duplicate in a total volume of 150 μl for 1 hr at 37° C. in 96-well flat-bottom poly-L-lysine-coated culture plates (Corning Biocoat). Cells were suspended using TrypLE express enzyme solution (Thermo Fisher Scientific) and immediately added to all wells (10,000 cells in 100 μL of growth medium per well). One set of 8 control wells received cells+virus (virus control) and another set of 8 wells received cells only (background control). After 66-72 hrs of incubation, medium was removed by gentle aspiration and 30 μL of Promega 1× lysis buffer was added to all wells. After a 10-minute incubation at room temperature, 100 μl of Bright-Glo luciferase reagent was added to all wells. After 1-2 minutes, 110 μl of the cell lysate was transferred to a black/white plate (Perkin-Elmer). Luminescence was measured using a PerkinElmer Life Sciences, Model Victor2 luminometer. Neutralization titers are the mAb concentration (IC50/IC80) at which relative luminescence units (RLU) were reduced by 50% and 80% compared to virus control wells after subtraction of background RLUs. Negative neutralization values are indicative of infection-enhancement. Maximum percent inhibition (MPI) is the reduction in RLU at the highest mAb concentration tested.

[0469] Another protocol was used to test plasma neutralization against pseudoviruses of SARS-CoV-2 WA-1 strain and variants. Human codon-optimized cDNA encoding SARS-CoV-2 spike glycoproteins of various strains were synthesized by GenScript and cloned into eukaryotic cell expression vector pcDNA 3.1 between the BamHI and XhoI sites. Pseudovirions were produced by co-transfection of Lenti-X 293T cells with psPAX2(gag/pol), pTrip-luc lentiviral vector and pcDNA 3.1 SARS-CoV-2-spike-deltaC19, using Lipofectamine 3000. The supernatants were collected at 48 h after transfection and filtered through 0.45-μm membranes and titrated using HEK293T cells that express ACE2 and TMPRSS2 protein (293T-ACE2-TMPRSS2 cells). For the neutralization assay, 50 μl of SARS-CoV-2 spike pseudovirions were pre-incubated with an equal volume of medium containing serum at varying dilutions at room temperature for 1 h, then virus-antibody mixtures were added to 293T-ACE2-TMPRSS2 cells in a 96-well plate. After a 3-h incubation, the inoculum was replaced with fresh medium. Cells were lysed 24 h later, and luciferase activity was measured using luciferin. Controls included cell-only control, virus without any antibody control and positive control sera. Neutralization titres are the serum dilution (ID50 or ID80) at which relative luminescence units (RLU) were reduced by 50% or 80%, respectively, compared to virus control wells after subtraction of background RLUs.

### Live SARS-CoV-2 Neutralization Assays

[0470] The SARS-CoV-2 virus (Isolate USA-WA1/2020, NR-52281) was deposited by the Centers for Disease Control and Prevention and obtained through BEI Resources, NIAID, NIH. SARS-CoV-2 Plaque Reduction Neutralization Test (PRNT) were performed in the Duke Regional Biocontaiment Laboratory BSL3 (Durham, NC) as previously described with virus-specific modifications⁷¹. Briefly, two-fold dilutions of plasma samples were incubated with 50 PFU SARS-CoV-2 virus (Isolate USA-WA1/2020, NR-52281) for 1 hour. The antibody/virus mixture is used to inoculate Vero E6 cells in a standard plaque assay^{72,73}. Briefly, infected cultures are incubated at 37° C., 5% C02 for 1 hour. At the end of the incubation, 1 mL of a viscous overlay (1:1 2×DMEM and 1.2% methylcellulose) is added to each well. Plates are incubated for 4 days. After fixation, staining and washing, plates are dried and plaques from each dilution of each sample are counted. Data are reported as the concentration at which 50% of input virus is neutralized. A known neutralizing control antibody is included in each batch run (Clone D001; SINO, CAT #40150-D001). GraphPad Prism was used to determine IC/EC₅₀ values.

### Spike Protein-Expressing Cell Antibody Binding Assay

[0471] The cell antibody binding assay was performed as previously described (Pino et al., 2021). Briefly, target cells were derived by transfection with plasmids designed to express the SARS-CoV-2 D614 Spike protein with a c-terminus flag tag (kindly provided by Dr. Farzan, Addgene plasmid no. 156420 (Zhang et al., 2020)). Cells not transfected with any plasmid (mock transfected) were used as a negative control condition. After resuspension, washing and counting, 1×10⁵ Spike-transfected target cells were dispensed into 96-well V-bottom plates and incubated with six serial dilutions of human plasma from infected participants starting at 1:50 dilution. Mock transfected cells were used as a negative infection control. After 30 minutes incubation at 37° C., cells are washed twice with 250 μL/well of PBS, stained with vital dye (Live/Dead Far Red Dead Cell Stain, Invitrogen) to exclude nonviable cells from subsequent analysis, washed with Wash Buffer (1% FBS-PBS; WB), permeabilized with CytoFix/CytoPerm (BD Biosciences), and stained with 1.25 μg/mL anti-human IgG Fc-PE/Cy7 (Clone HP6017; Biolegend) and 5 μg/mL anti-flag-FITC (clone M2; Sigma Aldrich) in the dark for 20 minutes at room temperature. After three washes with Perm Wash (BD Biosciences), the cells were resuspended in 125 μL PBS-1% paraformaldehyde. Samples were acquired within 24 h using a BD Fortessa cytometer and a High Throughput Sampler (HTS, BD Biosciences). Data analysis was performed using FlowJo 10 software (BD Biosciences). A minimum of 50,000 total events were acquired for each analysis. Gates were set to include singlet, live, flag+ and IgG+ events. All final data represent specific binding, determined by subtraction of non-specific binding observed in assays performed with mock-transfected cells.

### Antibody-Dependent NK Cell Degranulation Assay

[0472] Cell-surface expression of CD107a was used as a marker for NK cell degranulation, a prerequisite process for ADCC (Ferrari et al., 2011), was performed as previously described (Pino et al., 2021). Briefly, target cells were Vero E6 cells after a 2 day-infection with SARS-CoV-2 USA-WA1/2020 or 293T cells 2-days post transfection with a SARS-CoV-2 S protein (D614) expression plasmid. NK cells were purified from peripheral blood of a healthy human volunteer by negative selection (Miltenyi Biotech), and were incubated with target cells at a 1:1 ratio in the presence of diluted plasma or monoclonal antibodies, Brefeldin A (GolgiPlug, 1 μl/ml, BD Biosciences), monensin (GolgiStop, 4 μl/6 mL, BD Biosciences), and anti-CD107a-FITC (BD Biosciences, clone H4A3) in 96-well flat bottom plates for 6 hours at 37° C. in a humidified 5% C02 incubator. NK cells were then recovered and stained for viability prior to staining with CD56-PECy7 (BD Biosciences, clone NCAM16.2), CD16-PacBlue (BD Biosciences, clone 3G8), and CD69-BV785 (Biolegend, Clone FN50). Flow cytometry data analysis was performed using FlowJo software (v10.8.0). Data is reported as the % of CD107A+ live NK cells (gates included singlets, lymphocytes, aqua blue-, CD56+ and/or CD16+, CD107A+). All final data represent specific activity, determined by subtraction of non-specific activity observed in assays performed with mock-infected cells and in absence of antibodies.

### Intracellular Cytokine Staining (ICS) Assay

[0473] Cryopreserved PBMC were thawed and rested 4 hours at 37° C. in a 5% CO₂ environment. PBMC were then incubated for 6 hours in the presence of RPMI containing 10% fetal bovine serum (unstimulated), Staphylococcus enterotoxin B (SEB) as positive control, or pool peptide spanning the entire SARS-CoV-2 spike protein. All cultures contained a protein transport inhibitor, monensin (Golgi Plug; Becton, Dickinson and Company), and 1 μg/ml of anti-CD49d (Becton, Dickinson and Company, Cat #340976). Cultured cells were then stained with a cell viability marker and pre-titered quantities of antibodies against CD3/CD4/CD8/CD45RA/ICOS/CCR7/CXCR3/PD-1/CXCR5/CD69/CD154/IL-2/IFN-g/TNF-α/IL-4/IL-21/IL-13/IL-17A. Samples were analyzed on a LSR II instrument (Becton, Dickinson and Company, Franklin Lakes, NJ) using FlowJo software.

Viral RNA Extraction and Subgenomic mRNA Quantification

[0474] SARS-CoV-2 E gene and N gene subgenomic mRNA (sgRNA) was measured by a one-step RT-qPCR adapted from previously described methods^{45,74}. To generate standard curves, a SARS-CoV-2 E gene sgRNA sequence, including the 5′UTR leader sequence, transcriptional regulatory sequence (TRS), and the first 228 bp of E gene, was cloned into a pcDNA3.1 plasmid. For generating SARS-CoV-2 N gene sgRNA, the E gene was replaced with the first 227 bp of N gene. The recombinant pcDNA3.1 plasmid was linearized, transcribed using MEGAscript T7 Transcription Kit (ThermoFisher, catalog #AM1334), and purified with MEGAclear Transcription Clean-Up Kit (ThermoFisher, catalog #AM1908). The purified RNA products were quantified on Nanodrop, serial diluted, and aliquoted as E sgRNA or N sgRNA standards.

[0475] A QIAsymphony SP (Qiagen, Hilden, Germany) automated sample preparation platform along with a virus/pathogen DSP midi kit. RNA extracted from animal samples or standards were then measured in Tagman custom gene expression assays (ThermoFisher). For these assays we used TaqMan Fast Virus 1-Step Master Mix (ThermoFisher, catalog #4444432) and custom primers/probes targeting the E gene sgRNA (forward primer: 5′ CGA TCT CTT GTA GAT CTG TTC TCE 3′ (SEQ ID NO: 52); reverse primer: 5′ ATA TTG CAG CAG TAC GCA CAC A 3′ (SEQ ID NO: 49); probe: 5′ FAM-ACA CTA GCC ATC CTT ACT GCG CTT CG-BHQ1 3′ (SEQ ID NO: 53)) or the N gene sgRNA (forward primer: 5′ CGA TCT CTT GTA GAT CTG TTC TC 3′ (SEQ ID NO: 52); reverse primer: 5′ GGT GAA CCA AGA CGC AGT AT 3′ (SEQ ID NO: 54); probe: 5′ FAM-TAA CCA GAA TGG AGA ACG CAG TGG G-BHQ1 3′ (SEQ ID NO: 55)). RT-qPCR reactions were carried out on CFX384 Touch Real-Time PCR System (Bio-Rad) using a program below: reverse transcription at 50° C. for 5 minutes, initial denaturation at 95° C. for 20 seconds, then 40 cycles of denaturation-annealing-extension at 95° C. for 15 seconds and 60° C. for 30 seconds. Standard curves were used to calculate E or N sgRNA in copies per ml; the limit of detections (LOD) for both E and N sgRNA assays were 12.5 copies per reaction or 150 copies per mL of BAL/nasal swab.

### Histopathology

[0476] Lung specimen from nonhuman primates were fixed in 10% neutral buffered formalin, processed, and blocked in paraffin for histological analysis. All samples were sectioned at 5 μm and stained with hematoxylin-eosin (H&E) for routine histopathology. Sections were examined under light microscopy using an Olympus BX51 microscope and photographs were taken using an Olympus DP73 camera. Samples were scored by a board-certified veterinary pathologist in a blinded manner. The representative images are to characterize the types and arrangement of inflammatory cells, while the scores show the relative severity of the tissue section.

### Immunohistochemistry (IHC)

[0477] Staining for SARS-CoV-2 antigen was achieved on the Bond RX automated system with the Polymer Define Detection System (Leica) used per manufacturer's protocol. Tissue sections were dewaxed with Bond Dewaxing Solution (Leica) at 72° C. for 30 min then subsequently rehydrated with graded alcohol washes and 1× Immuno Wash (StatLab). Heat-induced epitope retrieval (HIER) was performed using Epitope Retrieval Solution 1 (Leica), heated to 100° C. for 20 minutes. A peroxide block (Leica) was applied for 5 min to quench endogenous peroxidase activity prior to applying the SARS-CoV-2 antibody (1:2000, GeneTex, GTX135357). Antibodies were diluted in Background Reducing Antibody Diluent (Agilent). The tissue was subsequently incubated with an anti-rabbit HRP polymer (Leica) and colorized with 3,3′-Diaminobenzidine (DAB) chromogen for 10 min. Slides were counterstained with hematoxylin.

### Mouse Immunization and Challenge

[0478] Eleven-month-old female BALB/c mice were purchased from Envigo (#047) and were used for the SARS-CoV, SARS-CoV-2 WA-1, SARS-CoV-2 B.1.351, and RsSHC014-CoV protection experiments. The study was carried out in accordance with the recommendations for care and use of animals by the Office of Laboratory Animal Welfare (OLAW), National Institutes of Health and the Institutional Animal Care and Use Committee (IACUC) of University of North Carolina (UNC permit no. A-3410-01). Animals were housed in groups of five and fed standard chow diets. Virus inoculations were performed under anesthesia and all efforts were made to minimize animal suffering. Mice were intramuscularly immunized with RBD-scNP formulated with 3M-052-AF+Alum or GLA-SE. For the SARS-CoV-2 WA-1 and RsSHC014 study, mice were immunized on week 0 and 2, and challenged on week 7. For the SARS-CoV-2 B.1.351 and SARS-CoV-1 study, mice were immunized on week 0 and 4, and challenged on week 6. All mice were anesthetized and infected intranasally with 1×10⁴ PFU/ml of SARS-CoV MA15, 1×10⁴ PFU/ml of SARS-CoV-2 WA1-MA10 or B.1.351-MA10, 1×10⁴ PFU/ml RsSHC014, which have been described previously⁷⁵⁻⁷⁷. Mice were weighted daily and monitored for signs of clinical disease, and selected groups were subjected to daily whole-body plethysmography. For all mouse studies, groups of n=10 mice were included per arm of the study. Lung viral titers and weight loss were measured from individual mice per group.

### Biocontainment and Biosafety

[0479] Studies were approved by the UNC Institutional Biosafety Committee approved by animal and experimental protocols in the Baric laboratory. All work described here was performed with approved standard operating procedures for SARS-CoV-2 in a biosafety level 3 (BSL-3) facility conforming to requirements recommended in the Microbiological and Biomedical Laboratories, by the U.S. Department of Health and Human Service, the U.S. Public Health Service, and the U.S. Center for Disease Control and Prevention (CDC), and the National Institutes of Health (NIH).

### Statistics Analysis

[0480] Data were plotted using Prism GraphPad 8.0. Wilcoxon rank sum exact test was performed to compare differences between groups with p-value<0.05 considered significant using SAS 9.4 (SAS Institute, Cary, NC). No adjustments were made to the p-values for multiple comparisons.

### REFERENCES

[0481] 1 Levin, E. G. et al. Waning Immune Humoral Response to BNT162b2 Covid-19 Vaccine over 6 Months. N Engl J Med, doi:10.1056/NEJMoa2114583 (2021).
[0482] 2 Chaudhary, N., Weissman, D. & Whitehead, K. A. mRNA vaccines for infectious diseases: principles, delivery and clinical translation. Nat Rev Drug Discov 20, 817-838, doi:10.1038/s41573-021-00283-5 (2021).
[0483] 3 Pardi, N., Hogan, M. J., Porter, F. W. & Weissman, D. mRNA vaccines—a new era in vaccinology. Nat Rev Drug Discov 17, 261-279, doi:10.1038/nrd.2017.243 (2018).
[0484] 4 Pardi, N., Hogan, M. J. & Weissman, D. Recent advances in mRNA vaccine technology. Curr Opin Immunol 65, 14-20, doi:10.1016/j.coi.2020.01.008 (2020). Baden, L. R. et al. Efficacy and Safety of the mRNA-1273 SARS-CoV-2 Vaccine. N Engl J Med 384, 403-416, doi:10.1056/NEJMoa2035389 (2021).
[0485] 6 Haynes, B. F. A New Vaccine to Battle Covid-19. N Engl J Med 384, 470-471, doi:10.1056/NEJMe2035557 (2021).
[0486] 7 Polack, F. P. et al. Safety and Efficacy of the BNT162b2 mRNA Covid-19 Vaccine. N Engl J Med 383, 2603-2615, doi:10.1056/NEJMoa2034577 (2020).
[0487] 8<https://www.gisaid.org/hcov19-variants/>(
[0488] 9 Wang, L. & Cheng, G. Sequence analysis of the emerging SARS-CoV-2 variant Omicron in South Africa. J Med Virol, doi:10.1002/jmv.27516 (2021).
[0489] 10 Saunders, K. O. et al. Neutralizing antibody vaccine for pandemic and pre-emergent coronaviruses. Nature 594, 553-559, doi:10.1038/s41586-021-03594-0 (2021).
[0490] 11 Li, D. et al. In vitro and in vivo functions of SARS-CoV-2 infection-enhancing and neutralizing antibodies. Cell 184, 4203-4219 e4232, doi:10.1016/j.cell.2021.06.021 (2021).
[0491] 12 Li, D., Sempowski, G. D., Saunders, K. O., Acharya, P. & Haynes, B. F. SARS-CoV-2 Neutralizing Antibodies for COVID-19 Prevention and Treatment. Annu Rev Med, doi:10.1146/annurev-med-042420-113838 (2021).
[0492] 13 Hastie, K. M. et al. Defining variant-resistant epitopes targeted by SARS-CoV-2 antibodies: A global consortium study. Science 374, 472-478, doi:10.1126/science.abh2315 (2021).
[0493] 14 Corbett, K. S. et al. Evaluation of the mRNA-1273 Vaccine against SARS-CoV-2 in Nonhuman Primates. N Engl J Med 383, 1544-1555, doi:10.1056/NEJMoa2024671 (2020).
[0494] 15 Dunkle, L. M. et al. Efficacy and Safety of NVX-CoV2373 in Adults in the United States and Mexico. N Engl J Med, doi:10.1056/NEJMoa2116185 (2021).
[0495] 16 Pino, M. et al. A yeast expressed RBD-based SARS-CoV-2 vaccine formulated with 3M-052-alum adjuvant promotes protective efficacy in non-human primates. Sci Immunol 6, doi:10.1126/sciimmunol.abh3634 (2021).
[0496] 17 Dai, L. et al. A Universal Design of Betacoronavirus Vaccines against COVID-19, MERS, and SARS. Cell 182, 722-733 e711, doi:10.1016/j.cell.2020.06.035 (2020).
[0497] 18 Routhu, N. K. et al. SARS-CoV-2 RBD trimer protein adjuvanted with Alum-3M-052 protects from SARS-CoV-2 infection and immune pathology in the lung. Nat Commun 12, 3587, doi:10.1038/s41467-021-23942-y (2021).
[0498] 19 Joyce, M. G. et al. A SARS-CoV-2 ferritin nanoparticle vaccine elicits protective immune responses in nonhuman primates. Sci Transl Med, eabi5735 (2021).
[0499] 20 Walls, A. C. et al. Elicitation of broadly protective sarbecovirus immunity by receptor-binding domain nanoparticle vaccines. Cell 184, 5432-5447 e5416, doi:10.1016/j.cell.2021.09.015 (2021).
[0500] 21 Benenson, S., Oster, Y., Cohen, M. J. & Nir-Paz, R. BNT162b2 mRNA Covid-19 Vaccine Effectiveness among Health Care Workers. N Engl J Med, doi:10.1056/NEJMc2101951 (2021).
[0501] 22 Dagan, N. et al. BNT162b2 mRNA Covid-19 Vaccine in a Nationwide Mass Vaccination Setting. N Engl J Med, doi:10.1056/NEJMoa2101765 (2021).
[0502] 23 Bar-On, Y. M. et al. Protection of BNT162b2 Vaccine Booster against Covid-19 in Israel. N Engl J Med, doi:10.1056/NEJMoa2114255 (2021).
[0503] 24 Doria-Rose, N. et al. Antibody Persistence through 6 Months after the Second Dose of mRNA-1273 Vaccine for Covid-19. N Engl J Med 384, 2259-2261, doi:10.1056/NEJMc2103916 (2021).
[0504] 25 Roest, S., Hoek, R. A. S. & Manintveld, O. C. BNT162b2 mRNA Covid-19 Vaccine in a Nationwide Mass Vaccination Setting. N Engl J Med 384, 1968-1970, doi:10.1056/NEJMc2104281 (2021).
[0505] 26 Thomas, S. J. et al. Safety and Efficacy of the BNT162b2 mRNA Covid-19 Vaccine through 6 Months. N Engl J Med, doi:10.1056/NEJMoa2110345 (2021).
[0506] 27 Thompson, M. G. et al. Prevention and Attenuation of Covid-19 with the BNT162b2 and mRNA-1273 Vaccines. N Engl J Med 385, 320-329, doi:10.1056/NEJMoa2107058 (2021).
[0507] 28 Widge, A. T. et al. Durability of Responses after SARS-CoV-2 mRNA-1273 Vaccination. N Engl J Med 384, 80-82, doi:10.1056/NEJMc2032195 (2021).
[0508] 29 Manaf, A. et al. Morbidity and mortality from COVID-19 post-vaccination breakthrough infections in association with vaccines and the emergence of variants in Bahrain. Research Square, doi:10.21203/rs.3.rs-828021/v1 (2021).
[0509] 30 Emary, K. R. W. et al. Efficacy of ChAdOx1 nCoV-19 (AZD1222) vaccine against SARS-CoV-2 variant of concern 202012/01 (B.1.1.7): an exploratory analysis of a randomised controlled trial. Lancet 397, 1351-1362, doi:10.1016/S0140-6736(21)00628-0 (2021).
[0510] 31 Jones, I. & Roy, P. Sputnik V COVID-19 vaccine candidate appears safe and effective. Lancet 397, 642-643, doi:10.1016/S0140-6736(21)00191-4 (2021).
[0511] 32 Voysey, M. et al. Safety and efficacy of the ChAdOx1 nCoV-19 vaccine (AZD1222) against SARS-CoV-2: an interim analysis of four randomised controlled trials in Brazil, South Africa, and the UK. Lancet 397, 99-111, doi:10.1016/S0140-6736(20)32661-1(2021).
[0512] 33 Voysey, M. et al. Single-dose administration and the influence of the timing of the booster dose on immunogenicity and efficacy of ChAdOx1 nCoV-19 (AZD1222) vaccine: a pooled analysis of four randomised trials. Lancet 397, 881-891, doi:10.1016/S0140-6736(21)00432-3 (2021).
[0513] 34 Tregoning, J. S., Flight, K. E., Higham, S. L., Wang, Z. & Pierce, B. F. Progress of the COVID-19 vaccine effort: viruses, vaccines and variants versus efficacy, effectiveness and escape. Nat Rev Immunol 21, 626-636, doi:10.1038/s41577-021-00592-1 (2021).
[0514] 35 Collie, S., Champion, J., Moultrie, H., Bekker, L. G. & Gray, G. Effectiveness of BNT162b2 Vaccine against Omicron Variant in South Africa. N Engl J Med, doi:10.1056/NEJMc2119270 (2021).
[0515] 36 Kanekiyo, M. et al. Self-assembling influenza nanoparticle vaccines elicit broadly neutralizing H1N1 antibodies. Nature 499, 102-106, doi:10.1038/naturel2202 (2013).
[0516] 37 King, H. A. D. et al. Efficacy and breadth of adjuvanted SARS-CoV-2 receptor-binding domain nanoparticle vaccine in macaques. Proc Natl Acad Sci USA 118, doi:10.1073/pnas.2106433118 (2021).
[0517] 38 Ma, X. et al. Nanoparticle Vaccines Based on the Receptor Binding Domain (RBD) and Heptad Repeat (HR) of SARS-CoV-2 Elicit Robust Protective Immune Responses. Immunity 53, 1315-1330 e1319, doi:10.1016/j.immuni.2020.11.015 (2020).
[0518] 39 Wang, W., Huang, B., Zhu, Y., Tan, W. & Zhu, M. Ferritin nanoparticle-based SARS-CoV-2 RBD vaccine induces a persistent antibody response and long-term memory in mice. Cell Mol Immunol 18, 749-751, doi:10.1038/s41423-021-00643-6 (2021).
[0519] 40 Wuertz, K. M. et al. A SARS-CoV-2 spike ferritin nanoparticle vaccine protects against heterologous challenge with B.1.1.7 and B.1.351 virus variants in Syrian golden hamsters. bioRxiv, doi:10.1101/2021.06.16.448525 (2021).
[0520] 41 Earle, K. A. et al. Evidence for antibody as a protective correlate for COVID-19 vaccines. Vaccine 39, 4423-4428, doi:10.1016/j.vaccine.2021.05.063 (2021).
[0521] 42 Khoury, D. S. et al. Neutralizing antibody levels are highly predictive of immune protection from symptomatic SARS-CoV-2 infection. Nat Med 27, 1205-1211, doi:10.1038/s41591-021-01377-8 (2021).
[0522] 43 He, X. et al. Low-dose Ad26.COV2.S protection against SARS-CoV-2 challenge in rhesus macaques. Cell 184, 3467-3473 e3411, doi:10.1016/j.cell.2021.05.040 (2021).
[0523] 44 Mercado, N. B. et al. Single-shot Ad26 vaccine protects against SARS-CoV-2 in rhesus macaques. Nature 586, 583-588, doi:10.1038/s41586-020-2607-z (2020).
[0524] 45 Yu, J. et al. DNA vaccine protection against SARS-CoV-2 in rhesus macaques. Science 369, 806-811, doi:10.1126/science.abc6284 (2020).
[0525] 46 Corbett, K. S. et al. Immune correlates of protection by mRNA-1273 vaccine against SARS-CoV-2 in nonhuman primates. Science 373, eabj0299, doi:10.1126/science.abj0299 (2021).
[0526] 47 Gilbert, P. B. et al. Immune Correlates Analysis of the mRNA-1273 COVID-19 Vaccine Efficacy Trial. medRxiv, doi:10.1101/2021.08.09.21261290 (2021).
[0527] 48 Heath, P. T. et al. Safety and Efficacy of NVX-CoV2373 Covid-19 Vaccine. N Engl J Med 385, 1172-1183, doi:10.1056/NEJMoa2107659 (2021).
[0528] 49 Mahase, E. Covid-19: Novavax vaccine efficacy is 86% against UK variant and 60% against South African variant. BMJ 372, n296, doi:10.1136/bmj.n296 (2021).
[0529] 50 Shinde, V. et al. Efficacy of NVX-CoV2373 Covid-19 Vaccine against the B.1.351 Variant. N Engl J Med 384, 1899-1909, doi:10.1056/NEJMoa2103055 (2021).
[0530] 51 Yang, J. et al. A vaccine targeting the RBD of the S protein of SARS-CoV-2 induces protective immunity. Nature 586, 572-577, doi:10.1038/s41586-020-2599-8 (2020).
[0531] 52 Francica, J. R. et al. Protective antibodies elicited by SARS-CoV-2 spike protein vaccination are boosted in the lung after challenge in nonhuman primates. Sci Transl Med 13, doi:10.1126/scitranslmed.abi4547 (2021).
[0532] 53 Chi, X. et al. A potent neutralizing human antibody reveals the N-terminal domain of the Spike protein of SARS-CoV-2 as a site of vulnerability. doi:10.1101/2020.05.08.083964 (2020).
[0533] 54 Cerutti, G. et al. Potent SARS-CoV-2 neutralizing antibodies directed against spike N-terminal domain target a single supersite. Cell Host Microbe, doi:10.1016/j.chom.2021.03.005 (2021).
[0534] 55 McCallum, M. et al. N-terminal domain antigenic mapping reveals a site of vulnerability for SARS-CoV-2. Cell, doi:10.1016/j.cell.2021.03.028 (2021).
[0535] 56 Schafer, A. et al. Antibody potency, effector function, and combinations in protection and therapy for SARS-CoV-2 infection in vivo. J Exp Med 218, doi:10.1084/jem.20201993 (2021).
[0536] 57 Winkler, E. S. et al. Human neutralizing antibodies against SARS-CoV-2 require intact Fc effector functions for optimal therapeutic protection. Cell 184, 1804-1820 e1816, doi:10.1016/j.cell.2021.02.026 (2021).
[0537] 58 Yamin, R. et al. Fc-engineered antibody therapeutics with improved anti-SARS-CoV-2 efficacy. Nature, doi:10.1038/s41586-021-04017-w (2021).
[0538] 59 Coffman, R. L., Sher, A. & Seder, R. A. Vaccine adjuvants: putting innate immunity to work. Immunity 33, 492-503, doi:10.1016/j.immuni.2010.10.002 (2010).
[0539] 60 HogenEsch, H., O'Hagan, D. T. & Fox, C. B. Optimizing the utilization of aluminum adjuvants in vaccines: you might just get what you want. NPJ Vaccines 3, 51, doi:10.1038/s41541-018-0089-x (2018).
[0540] 61 Kasturi, S. P. et al. 3M-052, a synthetic TLR-7/8 agonist, induces durable HIV-1 envelope-specific plasma cells and humoral immunity in nonhuman primates. Sci Immunol 5, doi:10.1126/sciimmunol.abb1025 (2020).
[0541] 62 Smimov, D., Schmidt, J. J., Capecchi, J. T. & Wightman, P. D. Vaccine adjuvant activity of 3M-052: an imidazoquinoline designed for local activity without systemic cytokine induction. Vaccine 29, 5434-5442, doi:10.1016/j.vaccine.2011.05.061 (2011).
[0542] 63 Marrack, P., McKee, A. S. & Munks, M. W. Towards an understanding of the adjuvant action of aluminium. Nat Rev Immunol 9, 287-293, doi:10.1038/nri2510 (2009).
[0543] 64 Arvin, A. M. et al. A perspective on potential antibody-dependent enhancement of SARS-CoV-2. Nature 584, 353-363, doi:10.1038/s41586-020-2538-8 (2020).
[0544] 65 Haynes, B. F. et al. Prospects for a safe COVID-19 vaccine. Sci Transl Med 12, doi:10.1126/scitranslmed.abe0948 (2020).
[0545] 66 Fox, C. B. et al. Adsorption of a synthetic TLR7/8 ligand to aluminum oxyhydroxide for enhanced vaccine adjuvant activity: A formulation approach. J Control Release 244, 98-107, doi:10.1016/j.jconrel.2016.11.011 (2016).
[0546] 67 Wrapp, D. et al. Cryo-EM structure of the 2019-nCoV spike in the prefusion conformation. Science 367, 1260-1263, doi:10.1126/science.abb2507 (2020).
[0547] 68 Zhou, T. et al. Structure-Based Design with Tag-Based Purification and In-Process Biotinylation Enable Streamlined Development of SARS-CoV-2 Spike Molecular Probes. Cell Rep 33, 108322, doi:10.1016/j.celrep.2020.108322 (2020).
[0548] 69 Korber, B. et al. Tracking Changes in SARS-CoV-2 Spike: Evidence that D614G Increases Infectivity of the COVID-19 Virus. Cell 182, 812-827 e819, doi:10.1016/j.cell.2020.06.043 (2020).
[0549] 70 Naldini, L., Blomer, U., Gage, F. H., Trono, D. & Verma, I. M. Efficient transfer, integration, and sustained long-term expression of the transgene in adult rat brains injected with a lentiviral vector. Proc Natl Acad Sci USA 93, 11382-11388, doi:10.1073/pnas.93.21.11382 (1996).
[0550] 71 Berry, J. D. et al. Development and characterisation of neutralising monoclonal antibody to the SARS-coronavirus. J Virol Methods 120, 87-96, doi:10.1016/j.jviromet.2004.04.009 (2004).
[0551] 72 Coleman, C. M. & Frieman, M. B. Growth and Quantification of MERS-CoV Infection. Curr Protoc Microbiol 37, 15E 12 11-19, doi:10.1002/9780471729259.mc15e02s37 (2015).
[0552] 73 Kint, J., Maier, H. J. & Jagt, E. Quantification of infectious bronchitis coronavirus by titration in vitro and in ovo. Methods Mol Biol 1282, 89-98, doi:10.1007/978-1-4939-2438-7_9 (2015).
[0553] 74 Wolfel, R. et al. Virological assessment of hospitalized patients with COVID-2019. Nature 581, 465-469, doi:10.1038/s41586-020-2196-x (2020).
[0554] 75 Menachery, V. D. et al. A SARS-like cluster of circulating bat coronaviruses shows potential for human emergence. Nat Med 21, 1508-1513, doi:10.1038/nm.3985 (2015).
[0555] 76 Leist, S. R. et al. A Mouse-Adapted SARS-CoV-2 Induces Acute Lung Injury and Mortality in Standard Laboratory Mice. Cell 183, 1070-1085.e1012, doi:10.1016/j.cell.2020.09.050 (2020).
[0556] 77 Roberts, A. et al. A mouse-adapted SARS-coronavirus causes disease and mortality in BALB/c mice. PLoS Pathog 3, e5, doi:10.1371/journal.ppat.0030005 (2007).

[0557] This example summarizes data from non-human primate studies (NHP) #177, #183 and #188.

[0558] In this Example 3 and in Example 1 the RBD vaccine is HV1302118.

[0559] In this Example 3 and in Example 1 the NTD vaccine is HV1302125 SARS-COV-2_NTD_C-SORTA_c3C8HTWSTII

[0560] In the Example 3 and in Example, 1 the Ectodomain vaccines is HV1302119 SARS-CoV-2 S-2P-foldon SortA_3C8HtS2.

[0561] Data in this Example 3 and FIGS. 38-42 show as follows.

[0562] All adjuvants protected macaques from WA-1 SARS-CoV-2.

[0563] RBD-scNP, or spike S2P-scNP induced both neutralizing and antibody-dependent cellular cytotoxicity (ADCC) antibodies in macaques, and protected all immunized monkeys against SARS-CoV-2 WA-1 strain.

[0564] NTD-scNP induce only ADCC but not neutralizing antibodies, yet it protected equally well with RBD-scNP or S2P-scNP from SARS-CoV-2 WA-1 challenge.

[0565] Whereas three doses of NTD-scNP protected all immunized macaques from SARS-CoV-2 challenge, it did not protect as well when boosting after two primes with mRNA-LNPs encoding S2P.

[0566] Two doses of RBD-scNP were sufficient to protect against the difficult-to-neutralize SARS-CoV-2 Beta variant.

[0567] FIGS. 38-42 summarize analyses of immunization studies from Example 1 and Example 3 with respect to omicron coronavirus variant.

### Example 4: Gene Fusion Nanoparticles

[0568] Three major coronavirus (CoV) outbreaks have occurred since 2003 (1-3). Two of these outbreaks were caused by group 2b coronaviruses with the remaining outbreak caused by a group 2C CoV (4, 5). Therefore, a universal CoV vaccine should protect against at least both group 2b and 2c betaCoVs. Neutralizing antibodies elicited by CoV infection or vaccination have exhibited broad neutralization of group 2b viruses (6-11), but cross-neutralization of group 2b and 2c viruses by a single antibody has yet to be reported (12). To expand the neutralization breadth of current vaccines, we will immunize with group 2b and 2c CoV immunogens as a bivalent nanoparticle (NP). The rationale for this design is supported by mosaic NPs displaying up to 8 different CoV receptor-binding domains (RBDs) have generated group 2B and 2C reactive antibodies in mice (13). The antigens expressed on the NPs will be the receptor-binding domain of the spike protein (RBD) of MERS-CoV and SARS-CoV-1. The RBD was chosen as the immunogen because: it is responsible for receptor recognition by the viral Spike (S) protein (14, 15), blocking the interaction between host receptor and the RBD is a principal mechanism of neutralizing Abs, and when humans make serum neutralizing antibodies they can target the RBD (16). Similarly, we have found after vaccination, RBD focused immunogens elicit comparable or higher neutralizing antibody titers than spike ectodomain immunogens (12). A nanoparticle format was chosen since RBD immunogenicity can be augmented by arraying multiple copies of it on NPs, mimicking virus-like particles (12, 13, 17-21). The bivalent NP vaccine can be encoded by nucleic acid such as nucleoside modified mRNA encapsulated in lipid nanoparticles (mRNA-LNPs) or plasmid DNA. In other embodiments of the vaccine the nanoparticle can be recombinant protein formulated with or without an adjuvant.

[0569] In some embodiments the NP is a 24-subunit self-assembling NP derived from H. pylori or T. ni ferritin (FIG. 24A). H. pylori and T. ni ferritin are distinct from human ferritin in sequence. H. pylori ferritin is composed a single subunit. In contrast, T. ni ferritin is composed of a heavy and light chain that each can display a single viral antigen. Thus, when assembled it displays 12 copies of each antigen on the same NP. We have successfully used this approach for protein HIV-1 subunit vaccines displaying the HIV-1 fusion peptide or the HIV-1 envelope trimer (FIG. 24B), and this approach is similar to the protein RBD NP we recently published (12). Ferritin NPs have a known safety profile since H. pylori ferritin NPs have been administered in clinical trials for SARS-CoV-2 spike ectodomain and influenza HA vaccines (NCT03186781; NCT04784767).

[0570] Recombinant protein NP immunogens have elicited neutralizing antibodies against multiple CoVs and increased neutralizing antibody titers compared to Spike ectodomain mRNA-LNP immunization (12). However, nucleoside-modified mRNA is a favorable vaccine platform because of its rapid manufacturability and distribution capability. Also, mRNA-LNP SARS-CoV-2 immunization has been shown to be 95% effective against SARS-CoV-2 infection and is well-tolerated in the general population (22, 23). Thus, the goal of this immunogen design is to combine the enhanced immunogenicity of Spike RBD NPs and high efficacy and manufacturability of nucleoside-modified mRNA-LNP vaccination. To use mRNAs the RBD and ferritin need to be expressed from a single gene encoding a fusion protein. To encode two different RBDs for bivalent immunogens, two mRNAs encoding each ferritin chain fused to a different RBD will be encapsulated in one lipid nanoparticle (LNP).

[0571] Antibodies, such as ADG-2, DH1047, and S309, can cross-neutralize SARS-CoV-1 and SARS-CoV-2 and other SARS-related viruses have been isolated from individuals infected with SARS-CoV-1 (6, 24, 25). The presence of these cross-neutralizing antibodies in SARS-CoV-1 infected individuals indicated that antibodies could target shared epitopes among multiple SARS-related viruses. Indeed, SARS-CoV-2 BNT162b6 immunization of SARS-CoV-1 convalescent individuals resulted in high titers of sarbecovirus neutralizing antibodies (26). Without wishing to be bound by theory, cross-reactive antibodies can be induced to high levels by boosting SARS-CoV-2 reactive B cells with a SARS-related CoV spike such as SARS-CoV-1 Spike. By administering a bivalent SARS-CoV-1 and MERS-CoV RBD NPs to individuals who have been vaccinated previously against SARS-CoV-2, pan group 2b neutralizing antibodies and broad group 2C-neutralizing antibodies will be elicited. Thus one use of this immunogen would be used to boost SARS-CoV-2 vaccine recipients with two immunizations of SARS-CoV-1 and MERS-CoV RBD bivalent NPs.

[0572] To display the receptor binding domain on the surface of ferritin nanoparticles, the two proteins have to be fused together to create a single fusion protein. Long linkers (>15 amino acids (aa)) are one way to separate the RBD in space from the ferritin subunit so that both proteins can fold without interfering with each other. Additionally, long linkers allow the protein of interest to be distanced away from the nanoparticle subunits that are trying to oligomerize into a nanoparticle. Our designs with 25 aa linkers were analyzed by AlphaFold and predicted to place the SARS-CoV-2 RBD inside the nanoparticle (FIG. 25). Due to the flexible glycine serine linker the RBD was able to turn and position itself below the ferritin subunit (FIG. 25D). We redesigned the linker for the ferritin and RBD to keep the rigid alpha helical linker and to shorten the glycine-serine linker to 3 aa. Alpha fold predicted this linker would not allow the RBD to fold under the ferritin subunit (FIG. 26). When modelled on an intact H. pylori ferritin nanoparticle the RBD was displayed on the surface. Moreover, the RBDs on the surface were distanced sufficiently not to clash with each other (FIG. 3). This linker was applied for designs using H. pylori ferritin. Here we show SARS-CoV-1, SARS-CoV-2, and MERS-CoV RBDs fused to the linker and ferritin subunit, but this design could be applied to any coronavirus receptor binding domain.

[0573] For T. ni ferritin we considered the same phenomenon could occur where the RBD was folding inside the ferritin. Since the N-terminus of the heavy and light chains are flexible loops this concern seemed reasonable. We introduced the 14 aa linker between MERS-CoV RBD and T. ni ferritin heavy or light chain and predicted the structure with AlphaFold. Interestingly AlphaFold predicted that for the light chain the RBD would be on the outside of the nanoparticle, but for the heavy chain the RBD was still predicted to fold inside the lumen of the nanoparticle. Thus, for T. ni ferritin where the N-termini of the protein was very flexible we removed the rigid linker and kept the GGS linker. The rationale for the design was that a shorter linker may not be long enough to stick the RBD inside the T. ni nanoparticle.

[0574] Non-limiting embodiments of sequences of gene fusion designs are described in Table 3 and FIG. 23.

[0575] Expression data are shown in FIG. 27A-B. These proteins will be further characterized in any suitable assay and/or animal study.

[0576] Various approached can be used to optimize protein and/or nucleic acid expression. We will change the signal peptide sequence which can boost expression in some cases. The linker will be optimized—the linker GGSEKAAKAEEAARPP (SEQ ID NO: 14) in the fusion RBD-GGSEKAAKAEEAARPP-ferritin (“GGSEKAAKAEEAARPP” disclosed as SEQ ID NO: 14) and the linker GGSEKAAKAEEAARP (SEQ ID NO: 13) in the fusion RBD-GGSEKAAKAEEAARP-ferritin (“GGSEKAAKAEEAARP” disclosed as SEQ ID NO: 13). This linker would have the rigidity needed to distance the RBD from the ferritin but it would also turn the rigid linker to orient more vertically rather than horizontally. The design goal would be to have the RBD be more perpendicular to the ferritin subunit.

[0577] The RBD sequence could be changed of the disulfide bond-stabilized designs are helpful or for the elimination of hydrophobic patches. Dalvie et al. PNAS Sep. 21, 2021 118 (38) e21068451 18; https://doi.org/10.1073/pnas.2106845118 have reported that hydrophobic patches on the RBD limit its expression and cause aggregation when it is expressed as a monomer in yeast. Some embodiments eliminate hydrophobic patches by introducing L452K and F490W mutations. MERS and SARS1 sequences with a similar design-having comparable mutations—will be generated.

### REFERENCES FOR EXAMPLE 4

[0578] 1. Guarner J. Three Emerging Coronaviruses in Two Decades. Am J Clin Pathol. 2020; 153(4):420-1. Epub 2020/02/14. doi: 10.1093/ajcp/aqaa029. PubMed PMID: 32053148; PMCID: PMC7109697.
[0579] 2. Peeri N C, Shrestha N, Rahman M S, Zaki R, Tan Z, Bibi S, Baghbanzadeh M, Aghamohammadi N, Zhang W, Haque U. The SARS, MERS and novel coronavirus (COVID-19) epidemics, the newest and biggest global health threats: what lessons have we learned? Int J Epidemiol. 2020; 49(3):717-26. Epub 2020/02/23. doi: 10.1093/ije/dyaa033. PubMed PMID: 32086938; PMCID: PMC7197734.
[0580] 3. Sempowski G D, Saunders K O, Acharya P, Wiehe K J, Haynes B F. Pandemic Preparedness: Developing Vaccines and Therapeutic Antibodies For COVID-19. Cell. 2020; 181(7):1458-63. Epub 2020/06/04. doi: 10.1016/j.cell.2020.05.041. PubMed PMID: 32492407; PMCID: PMC7250787.
[0581] 4. Gralinski L E, Menachery V D. Return of the Coronavirus: 2019-nCoV. Viruses. 2020; 12(2). Epub 2020/01/30. doi: 10.3390/v12020135. PubMed PMID: 31991541; PMCID: PMC7077245.
[0582] 5. Menachery V D, Graham R L, Baric R S. Jumping species—a mechanism for coronavirus persistence and survival. Curr Opin Virol. 2017; 23:1-7. Epub 2017/02/20. doi: 10.1016/j.coviro.2017.01.002. PubMed PMID: 28214731; PMCID: PMC5474123.
[0583] 6. Pinto D, Park Y J, Beltramello M, Walls A C, Tortorici M A, Bianchi S, Jaconi S, Culap K, Zatta F, De Marco A, Peter A, Guarino B, Spreafico R, Cameroni E, Case J B, Chen R E, Havenar-Daughton C, Snell G, Telenti A, Virgin H W, Lanzavecchia A, Diamond M S, Fink K, Veesler D, Corti D. Cross-neutralization of SARS-CoV-2 by a human monoclonal SARS-CoV antibody. Nature. 2020; 583(7815):290-5. Epub 2020/05/19. doi: 10.1038/s41586-020-2349-y. PubMed PMID: 32422645.
[0584] 7. Wec A Z, Wrapp D, Herbert A S, Maurer D P, Haslwanter D, Sakharkar M, Jangra R K, Dieterle M E, Lilov A, Huang D, Tse L V, Johnson N V, Hsieh C L, Wang N, Nett J H, Champney E, Burnina I, Brown M, Lin S, Sinclair M, Johnson C, Pudi S, Bortz R, 3rd, Wirchnianski A S, Laudermilch E, Florez C, Fels J M, O'Brien C M, Graham B S, Nemazee D, Burton D R, Baric R S, Voss J E, Chandran K, Dye J M, McLellan J S, Walker L M. Broad neutralization of SARS-related viruses by human monoclonal antibodies. Science. 2020; 369(6504):731-6. Epub 2020/06/17. doi: 10.1126/science.abc7424. PubMed PMID: 32540900; PMCID: PMC7299279.
[0585] 8. Rappazzo C G, Tse L V, Kaku C I, Wrapp D, Sakharkar M, Huang D, Deveau L M, Yockachonis T J, Herbert A S, Battles M B, O'Brien C M, Brown M E, Geoghegan J C, Belk J, Peng L, Yang L, Hou Y, Scobey T D, Burton D R, Nemazee D, Dye J M, Voss J E, Gunn B M, McLellan J S, Baric R S, Gralinski L E, Walker L M. Broad and potent activity against SARS-like viruses by an engineered human monoclonal antibody. Science. 2021; 371(6531):823-9. Epub 2021/01/27. doi: 10.1126/science.abf4830. PubMed PMID: 33495307; PMCID: PMC7963221.
[0586] 9. Martinez D R, Schaefer A, Gobeil S, Li D, De la Cruz G, Parks R, Lu X, Barr M, Manne K, Mansouri K, Edwards R J, Yount B, Anasti K, Montgomery S A, Shen S, Zhou T, Kwong P D, Graham B S, Mascola J R, Montefiori D C, Alam M, Sempowski G D, Wiehe K, Saunders K O, Acharya P, Haynes B F, Baric R S. A broadly neutralizing antibody protects against SARS-CoV, pre-emergent bat CoVs, and SARS-CoV-2 variants in mice. bioRxiv. 2021. Epub 2021/05/06. doi: 10.1101/2021.04.27.441655. PubMed PMID: 33948590; PMCID: PMC8095197.
[0587] 10. Li D, Edwards R J, Manne K, Martinez D R, Schafer A, Alam S M, Wiehe K, Lu X, Parks R, Sutherland L L, Oguin T H, 3rd, McDanal C, Perez L G, Mansouri K, Gobeil S M C, Janowska K, Stalls V, Kopp M, Cai F, Lee E, Foulger A, Hernandez G E, Sanzone A, Tilahun K, Jiang C, Tse L V, Bock K W, Minai M, Nagata B M, Cronin K, Gee-Lai V, Deyton M, Barr M, Von Holle T, Macintyre A N, Stover E, Feldman J, Hauser B M, Caradonna™, Scobey T D, Rountree W, Wang Y, Moody M A, Cain D W, DeMarco C T, Denny T N, Woods C W, Petzold E W, Schmidt A G, Teng I T, Zhou T, Kwong P D, Mascola J R, Graham B S, Moore I N, Seder R, Andersen H, Lewis M G, Montefiori D C, Sempowski G D, Baric R S, Acharya P, Haynes B F, Saunders K O. In vitro and in vivo functions of SARS-CoV-2 infection-enhancing and neutralizing antibodies. Cell. 2021; 184(16):4203-19 e32. Epub 2021/07/10. doi: 10.1016/j.cell.2021.06.021. PubMed PMID: 34242577; PMCID: PMC8232969.
[0588] 11. Li D, Sempowski G D, Saunders K O, Acharya P, Haynes B F. SARS-CoV-2 Neutralizing Antibodies for COVID-19 Prevention and Treatment. Annu Rev Med. 2021. Epub 2021/08/25. doi: 10.1146/annurev-med-042420-113838. PubMed PMID: 34428080.
[0589] 12. Saunders K O, Lee E, Parks R, Martinez D R, Li D, Chen H, Edwards R J, Gobeil S, Barr M, Mansouri K, Alam S M, Sutherland L L, Cai F, Sanzone A M, Berry M, Manne K, Bock K W, Minai M, Nagata B M, Kapingidza A B, Azoitei M, Tse L V, Scobey T D, Spreng R L, Rountree R W, DeMarco C T, Denny T N, Woods C W, Petzold E W, Tang J, Oguin T H, 3rd, Sempowski G D, Gagne M, Douek D C, Tomai M A, Fox C B, Seder R, Wiehe K, Weissman D, Pardi N, Golding H, Khurana S, Acharya P, Andersen H, Lewis M G, Moore I N, Montefiori D C, Baric R S, Haynes B F. Neutralizing antibody vaccine for pandemic and pre-emergent coronaviruses. Nature. 2021; 594(7864):553-9. Epub 2021/05/11. doi: 10.1038/s41586-021-03594-0. PubMed PMID: 33971664.
[0590] 13. Cohen A A, Gnanapragasam P N P, Lee Y E, Hoffman P R, Ou S, Kakutani L M, Keeffe J R, Wu H J, Howarth M, West A P, Barnes C O, Nussenzweig M C, Bjorkman P J. Mosaic nanoparticles elicit cross-reactive immune responses to zoonotic coronaviruses in mice. Science. 2021. Epub 2021/01/14. doi: 10.1126/science.abf6840. PubMed PMID: 33436524.
[0591] 14. Cai Y, Zhang J, Xiao T, Peng H, Sterling S M, Walsh R M, Rawson S, Rits-Volloch S, Chen B. Distinct conformational states of SARS-CoV-2 spike protein. bioRxiv. 2020. Epub 2020/06/09. doi: 10.1101/2020.05.16.099317. PubMed PMID: 32511405; PMCID: PMC7263552.
[0592] 15. Shang J, Wan Y, Luo C, Ye G, Geng Q, Auerbach A, Li F. Cell entry mechanisms of SARS-CoV-2. Proc Natl Acad Sci USA. 2020; 117(21):11727-34. Epub 2020/05/08. doi: 10.1073/pnas.2003138117. PubMed PMID: 32376634; PMCID: PMC7260975.
[0593] 16. Piccoli L, Park Y J, Tortorici M A, Czudnochowski N, Walls A C, Beltramello M, Silacci-Fregni C, Pinto D, Rosen L E, Bowen J E, Acton O J, Jaconi S, Guarino B, Minola A, Zatta F, Sprugasci N, Bassi J, Peter A, De Marco A, Nix J C, Mele F, Jovic S, Rodriguez B F, Gupta S V, Jin F, Piumatti G, Lo Presti G, Pellanda A F, Biggiogero M, Tarkowski M, Pizzuto M S, Cameroni E, Havenar-Daughton C, Smithey M, Hong D, Lepori V, Albanese E, Ceschi A, Bernasconi E, Elzi L, Ferrari P, Garzoni C, Riva A, Snell G, Sallusto F, Fink K, Virgin H W, Lanzavecchia A, Corti D, Veesler D. Mapping Neutralizing and Immunodominant Sites on the SARS-CoV-2 Spike Receptor-Binding Domain by Structure-Guided High-Resolution Serology. Cell. 2020; 183(4):1024-42 e21. Epub 2020/09/30. doi: 10.1016/j.cell.2020.09.037. PubMed PMID: 32991844; PMCID: PMC7494283.
[0594] 17. King H A D, Joyce M G, Lakhal-Naouar I, Ahmed A, Cincotta C M, Subra C, Peachman K K, Hack H R, Chen R E, Thomas P V, Chen W H, Sankhala R S, Hajduczki A, Martinez E J, Peterson C E, Chang W C, Choe M, Smith C, Headley J A, Elyard H A, Cook A, Anderson A, Wuertz K M, Dong M, Swafford I, Case J B, Currier J R, Lal K G, Amare M F, Dussupt V, Molnar S, Daye S P, Zeng X, Barkei E K, Alfson K, Staples H M, Carrion R, Krebs S J, Paquin-Proulx D, Karasavvas N, Polonis V R, Jagodzinski L L, Vasan S, Scott P T, Huang Y, Nair M S, Ho D D, de Val N, Diamond M S, Lewis M G, Rao M, Matyas G R, Gromowski G D, Peel S A, Michael N L, Modjarrad K, Bolton D L. Efficacy and breadth of adjuvanted SARS-CoV-2 receptor-binding domain nanoparticle vaccine in macaques. Proc Natl Acad Sci USA. 2021; 118(38). Epub 2021/09/03. doi: 10.1073/pnas.2106433118. PubMed PMID: 34470866.
[0595] 18. López-Sagaseta J, Malito E, Rappuoli R, Bottomley M J. Self-assembling protein nanoparticles in the design of vaccines. Comput Struct Biotechnol J. 2016; 14:58-68. Epub 2016/02/11. doi: 10.1016/j.csbj.2015.11.001. PubMed PMID: 26862374; PMCID: PMC4706605.
[0596] 19. Bangaru S, Ozorowski G, Turner H L, Antanasijevic A, Huang D, Wang X, Torres J L, Diedrich J K, Tian J H, Portnoff A D, Patel N, Massare M J, Yates J R, 3rd, Nemazee D, Paulson J C, Glenn G, Smith G, Ward A B. Structural analysis of full-length SARS-CoV-2 spike protein from an advanced vaccine candidate. Science. 2020; 370(6520):1089-94. Epub 2020/10/22. doi: 10.1126/science.abel502. PubMed PMID: 33082295.
[0597] 20. Walls A C, Fiala B, Schafer A, Wrenn S, Pham M N, Murphy M, Tse L V, Shehata L, O'Connor M A, Chen C, Navarro M J, Miranda M C, Pettie D, Ravichandran R, Kraft J C, Ogohara C, Palser A, Chalk S, Lee E C, Guerriero K, Kepl E, Chow C M, Sydeman C, Hodge E A, Brown B, Fuller J T, Dinnon K H, 3rd, Gralinski L E, Leist S R, Gully K L, Lewis T B, Guttman M, Chu H Y, Lee K K, Fuller D H, Baric R S, Kellam P, Carter L, Pepper M, Sheahan T P, Veesler D, King N P. Elicitation of Potent Neutralizing Antibody Responses by Designed Protein Nanoparticle Vaccines for SARS-CoV-2. Cell. 2020; 183(5):1367-82 e17. Epub 2020/11/09. doi: 10.1016/j.cell.2020.10.043. PubMed PMID: 33160446; PMCID: PMC7604136.
[0598] 21. Ma X, Zou F, Yu F, Li R, Yuan Y, Zhang Y, Zhang X, Deng J, Chen T, Song Z, Qiao Y, Zhan Y, Liu J, Zhang J, Zhang X, Peng Z, Li Y, Lin Y, Liang L, Wang G, Chen Y, Chen Q, Pan T, He X, Zhang H. Nanoparticle Vaccines Based on the Receptor Binding Domain (RBD) and Heptad Repeat (HR) of SARS-CoV-2 Elicit Robust Protective Immune Responses. Immunity. 2020; 53(6):1315-30 e9. Epub 2020/12/05. doi: 10.1016/j.immuni.2020.11.015. PubMed PMID: 33275896; PMCID: PMC7687490.
[0599] 22. Polack F P, Thomas S J, Kitchin N, Absalon J, Gurtman A, Lockhart S, Perez J L, Perez Marc G, Moreira E D, Zerbini C, Bailey R, Swanson K A, Roychoudhury S, Koury K, Li P, Kalina W V, Cooper D, Frenck R W, Jr., Hammitt L L, Tureci 0, Nell H, Schaefer A, Unal S, Tresnan D B, Mather S, Dormitzer P R, Sahin U, Jansen K U, Gruber W C, Group CCT. Safety and Efficacy of the BNT162b2 mRNA Covid-19 Vaccine. N Engl J Med. 2020; 383(27):2603-15. Epub 2020/12/11. doi: 10.1056/NEJMoa2034577. PubMed PMID: 33301246; PMCID: PMC7745181.
[0600] 23. Baden L R, El Sahly H M, Essink B, Kotloff K, Frey S, Novak R, Diemert D, Spector S A, Rouphael N, Creech C B, McGettigan J, Khetan S, Segall N, Solis J, Brosz A, Fierro C, Schwartz H, Neuzil K, Corey L, Gilbert P, Janes H, Follmann D, Marovich M, Mascola J, Polakowski L, Ledgerwood J, Graham B S, Bennett H, Pajon R, Knightly C, Leav B, Deng W, Zhou H, Han S, Ivarsson M, Miller J, Zaks T, Group C S. Efficacy and Safety of the mRNA-1273 SARS-CoV-2 Vaccine. N Engl J Med. 2021; 384(5):403-16. Epub 2020/12/31. doi: 10.1056/NEJMoa2035389. PubMed PMID: 33378609; PMCID: PMC7787219.
[0601] 24. Li D, Edwards R J, Manne K, Martinez D R, Schafer A, Alam S M, Wiehe K, Lu X, Parks R, Sutherland L L, Oguin T H, McDanal C, Perez L G, Mansouri K, Gobeil S M C, Janowska K, Stalls V, Kopp M, Cai F, Lee E, Foulger A, Hernandez G E, Sanzone A, Tilahun K, Jiang C, Tse L V, Bock K W, Minai M, Nagata B M, Cronin K, Gee-Lai V, Deyton M, Barr M, Von Holle T, Macintyre A N, Stover E, Feldman J, Hauser B M, Caradonna™, Scobey T D, Moody M A, Cain D W, DeMarco C T, Denny T N, Woods C W, Petzold E W, Schmidt A G, Teng I T, Zhou T, Kwong P D, Mascola J R, Graham B S, Moore I N, Seder R, Andersen H, Lewis M G, Montefiori D C, Sempowski G D, Baric R S, Acharya P, Haynes B F, Saunders K O. The functions of SARS-CoV-2 neutralizing and infection-enhancing antibodies in vitro and in mice and nonhuman primates. bioRxiv. 2021. Epub 2021/01/15. doi: 10.1101/2020.12.31.424729. PubMed PMID: 33442694; PMCID: PMC7805451.
[0602] 25. Rappazzo C G, Tse L V, Kaku C I, Wrapp D, Sakharkar M, Huang D, Deveau L M, Yockachonis T J, Herbert A S, Battles M B, O'Brien C M, Brown M E, Geoghegan J C, Belk J, Peng L, Yang L, Hou Y, Scobey T D, Burton D R, Nemazee D, Dye J M, Voss J E, Gunn B M, McLellan J S, Baric R S, Gralinski L E, Walker L M. Broad and potent activity against SARS-like viruses by an engineered human monoclonal antibody. Science. 2021. Epub 2021/01/27. doi: 10.1126/science.abf4830. PubMed PMID: 33495307.
[0603] 26. Tan C W, Chia W N, Young B E, Zhu F, Lim B L, Sia W R, Them T L, Chen M I, Leo Y S, Lye D C, Wang L F. Pan-Sarbecovirus Neutralizing Antibodies in BNT162b2-Immunized SARS-CoV-1 Survivors. N Engl J Med. 2021. Epub 2021/08/19. doi: 10.1056/NEJMoa2108453. PubMed PMID: 34407341; PMCID: PMC8422514.

### Example 5: Disulfide Stabilized RBD

[0604] To stabilize the receptor binding domain of various coronaviruses, we introduced cysteine residues that make new disulfide bonds within each RBD molecule. These new disulfide bonds hold individual strands of receptor binding domain together such that the RBD is constrained from changing conformation. The cysteine locations were determined by loading the structures of SARS-CoV-2, MERS-CoV, or SARS-CoV S proteins (PDB: 6VXX, 5W9H, 7AKJ) into Disulfide by Design (http://cptweb.cpt.wayne.edu/DbD2/index.php). The sites for introduction of cysteines were noted for the amino acids that correspond to the receptor binding domain of each protein.

[0605] Two wildtype amino acids were replaced with pairs of cysteines predicted based on the structure to be correctly spaced apart and orientated correctly for a disulfide bond to form. Each pair of cysteines were evaluated individually for improvement in thermostability and overall protein yield. Mutations that improved these protein features were combined into a single protein in various combinations to get a more stable, higher-yield expressing molecule.

TABLE 5
Listing of SARS-CoV2 RBD disulfide designs. Non-limiting
embodiments of sequences are shown in FIG. 43.

| Protein ID | Protein name |
|---|---|
| HV1302813 | SARS2RBDcore_ext_v2_3C-twST2_W353C_F400C |
| HV1302814 | SARS2RBDcore_ext_v2_3C-twST2_I358C_V395C |
| HV1302815 | SARS2RBDcore_ext_v2_3C-twST2_A435C_V510C |
| HV1302816 | SARS2RBDcore_ext_v2_3C-twST2_P412C_F429C |
| HV1302817 | SARS2RBDcore_ext_v2_3C-twST2_D405C_G504C |
| HV1302818 | SARS2RBDcore_ext_v2_3C-twST2_S438C_D442C |
| HV1302819 | SARS2RBDcore_ext_v2_3C-twST2_N501C_Y505C |
| HV1302820 | SARS2RBDcore_ext_v2_3C-twST2_G447C_G496C |
| HV1302821 | SARS2RBDcore_ext_v2_3C-twST2_Y365C_L387C |
| HV1302822 | SARS2RBDcore_ext_v2_3C-twST2_F497C_P507C |
| HV1302823 | SARS2RBDcore_ext_v2_3C-twST2_Q409C_A419C |

[0606] Sites where cysteines will be introduced in MERS-CoV Spike protein for stabilizing the RBD.

TABLE 6
MERS-CoV S sites for Cys residues to form new disulfide bonds.
MERS-CoV S sites for Cys residues to form new disulfide bonds

| Mutation | Amino acid | Amino acid |
|---|---|---|
| pair number | position 1 | position 2 |
| 1 | 383 | 409 |
| 2 | 390 | 490 |
| 3 | 393 | 447 |
| 4 | 394 | 398 |
| 5 | 399 | 446 |
| 6 | 408 | 587 |
| 7 | 410 | 413 |
| 8 | 418 | 482 |
| 9 | 422 | 481 |
| 10 | 428 | 476 |
| 11 | 429 | 432 |
| 12 | 439 | 581 |
| 13 | 449 | 561 |
| 14 | 455 | 464 |
| 15 | 460 | 465 |
| 16 | 463 | 501 |
| 17 | 471 | 477 |
| 18 | 484 | 567 |
| 19 | 498 | 534 |
| 20 | 502 | 557 |
| 21 | 506 | 553 |
| 22 | 507 | 512 |
| 23 | 526 | 556 |
| 24 | 534 | 558 |
| 25 | 540 | 557 |
| 26 | 545 | 549 |
| 27 | 578 | 582 |
| 28 | 588 | 591 |

[0607] Sites where cysteines will be introduced in SARS-CoV Spike protein for stabilizing the RBD.

TABLE 7
SARS-CoV S sites for Cys residues to form new disulfide bonds.
SARS-CoV S sites for Cys residues to form new disulfide bonds

| Mutation | Amino acid | Amino acid |
|---|---|---|
| pair number | position 1 | position 2 |
| 1 | 323 | 348 |
| 2 | 323 | 350 |
| 3 | 340 | 387 |
| 4 | 346 | 509 |
| 5 | 352 | 374 |
| 6 | 366 | 419 |
| 7 | 368 | 417 |
| 8 | 378 | 508 |
| 9 | 378 | 511 |
| 10 | 380 | 504 |
| 11 | 401 | 406 |
| 12 | 413 | 450 |
| 13 | 425 | 429 |
| 14 | 429 | 493 |
| 15 | 434 | 482 |
| 16 | 436 | 482 |
| 17 | 441 | 478 |
| 18 | 443 | 477 |
| 19 | 448 | 452 |
| 20 | 469 | 474 |
| 21 | 487 | 491 |
| 22 | 524 | 576 |

[0608] Each pair of cysteines modifications in SARS1 and MERS1 sequences will evaluated individually for improvement in thermostability and overall protein yield. Mutations that improve these protein features will be combined into a single protein in various combinations to get a more stable, higher-yield expressing molecule.

1. A recombinant fusion protein comprising in order a full-length coronavirus spike protein or a portion thereof, a peptide linker and a self-assembling protein, wherein the fusion protein is comprised in a multimeric protein complex, wherein the recombinant fusion protein is shown in FIG. 18, FIG. 20, FIG. 21, FIG. 22, FIG. 23, and FIG. 45 and Table 1, Table 2, Table 3 and Table 5.

2. The recombinant fusion protein of claim 1, wherein the coronavirus spike proteins or portions thereof is RBD—amino acids 319-541; RBDcore—amino acids 333-524 see FIG. 21B, RBDcoreExt—amino acids 333-527, RBDcoreExtKK—amino acids 333-529 see FIG. 22, or N-terminal domain (NTD)—amino acids 27-292, wherein amino acid positions are with respect to CoV2 sequence.

3. The recombinant fusion protein of claim 1 wherein the linker is described in Table 4,
or is GGS(n)EKAAKAEEAAR(PP) (SEQ ID NO: 4) or EKAAKAEEAAR(PP)GGS(n), wherein n=1, 2, or 3 (SEQ ID NO: 5).

4. (canceled)

5. (canceled)

6. (canceled)

7. (canceled)

8. The recombinant fusion protein of claim 1 wherein the self-assembling protein is ferritin and the multimeric protein complex is a ferritin nanoparticle.

9. A nucleic acid encoding the coronavirus spike protein or fragment thereof in the recombinant fusion protein of claim 1.

10. A multimeric protein complex comprising the recombinant fusion protein sequence of claim 1.

11. (canceled)

12. (canceled)

13. (canceled)

14. (canceled)

15. (canceled)

16. (canceled)

17. (canceled)

18. The multimeric protein complex of claim 10, wherein the multimeric protein complex is multispecific comprising:
(a) two, three, four or more different recombinant fusion proteins comprising in order a full-length coronavirus spike protein or a portion thereof, wherein the two, three, four or more full-length coronavirus spike protein or a portion thereof have different sequences, a peptide linker and a self-assembling protein,
(b) two or three different recombinant fusion proteins comprising in order a full-length coronavirus spike protein or a portion thereof, a peptide linker and a self-assembling protein, wherein the recombinant fusion proteins represent different coronaviruses from subgroups 2a, 2b, 2c, 2d or combinations thereof,
(c) two or three different recombinant fusion proteins comprising in order a full-length coronavirus spike protein or a portion thereof, a peptide linker and a self-assembling protein, wherein the recombinant fusion proteins comprise beta coronavirus sequences, delta coronavirus sequences or combinations thereof, or
(d) one or more recombinant fusion proteins comprising in order a full-length coronavirus spike protein or a portion thereof, a peptide linker and a self-assembling protein, wherein the recombinant fusion proteins comprise recombinant fusion proteins from group 2b and group 2c betacoronaviruses.

19. (canceled)

20. (canceled)

21. (canceled)

22. (canceled)

23. A composition comprising the recombinantly fusion protein or a portion thereof of claim 1 and a pharmaceutically acceptable carrier.

24. A composition comprising a plurality of multimeric protein complexes of claim 10.

25. The composition of claim 24 wherein the plurality of multimeric protein complexes comprises:
(a) complexes each one having an identical recombinant fusion protein sequence comprising in order a full-length coronavirus spike protein or a portion thereof, a peptide linker and a self-assembling protein, or
(b) two, three, or four multimeric complexes each one having a different recombinant fusion protein sequence comprising in order a full-length coronavirus spike protein or a portion thereof, a peptide linker and a self-assembling protein.

26. (canceled)

27. A composition comprising one or more nucleic acids encoding a recombinant fusion protein of claim 1 and a pharmaceutically acceptable carrier.

28. (canceled)

29. The composition of claim 27 wherein the nucleic acid is an mRNA.

30. A virus-like particle comprising the recombinant fusion protein of claim 1.

31. A host cell comprising a nucleic acid molecule encoding a recombinant fusion protein of claim 1.

32. A method of producing the multimeric protein complex of claim 10 comprising:
expressing a nucleic acid molecule or vector encoding a recombinant fusion protein in a host cell under conditions suitable to produce the recombinant fusion protein;
purifying the recombinant fusion protein;
conjugating the recombinant fusion protein to a self-assembling ferritin protein in the presence of a sortase enzyme, under suitable conjugation conditions to form a multimeric ferritin protein complex comprising the recombinant fusion protein; and
isolating the multimeric ferritin protein complex comprising the recombinant fusion protein from the conjugation reaction.

33. An immunogenic composition comprising the recombinant fusion protein of claim 1, a nucleic acid encoding the recombinant fusion protein, a multimeric protein complex or a VLP comprising the recombinant fusion protein and a pharmaceutically acceptable carrier and an adjuvant.

34. A method for inducing an immune response to a coronavirus in a subject, comprising administering to the subject an effective amount of the recombinant fusion protein of claim 1, a nucleic acid encoding the recombinant fusion protein, or a multimeric protein complex or a VLP in an amount sufficient to induce an immune response.

35. The method of claim 34, wherein the effective amount is administered as a boost.

The application's sequence listing, which the Patent Office published only in electronic form, follows.

SEQUENCE LISTING (253 sequences)

SEQ ID NO: 1 - protein, 12 aa, Artificial Sequence
  Description of Artificial Sequence: Synthetic peptide
  MOD_RES (3)..(3): Any amino acid
  See specification as filed for detailed description of substitutions and preferred embodiments
LPXTGGGGGGSG

SEQ ID NO: 2 - protein, 12 aa, Artificial Sequence
  Description of Artificial Sequence: Synthetic peptide
  MOD_RES (6)..(6): Any amino acid
  See specification as filed for detailed description of substitutions and preferred embodiments
GSGLPXTGGGGG

SEQ ID NO: 3 - protein, 9 aa, Artificial Sequence
  Description of Artificial Sequence: Synthetic peptide
  SITE (1)..(9): This sequence may encompass 1-3 "Gly Gly Ser" repeating units
GGSGGSGGS

SEQ ID NO: 4 - protein, 22 aa, Artificial Sequence
  Description of Artificial Sequence: Synthetic peptide
  SITE (1)..(9): This sequence may encompass 1-3 "Gly Gly Ser" repeating units
GGSGGSGGSEKAAKAEEAARPP

SEQ ID NO: 5 - protein, 22 aa, Artificial Sequence
  Description of Artificial Sequence: Synthetic peptide
  SITE (14)..(22): This sequence may encompass 1-3 "Gly Gly Ser" repeating units
EKAAKAEEAARPPGGSGGSGGS

SEQ ID NO: 6 - protein, 12 aa, Artificial Sequence
  Description of Artificial Sequence: Synthetic peptide
  SITE (1)..(12): This sequence may encompass 1-4 "Gly Gly Ser" repeating units
GGSGGSGGSGGS

SEQ ID NO: 7 - protein, 25 aa, Artificial Sequence
  Description of Artificial Sequence: Synthetic peptide
  SITE (1)..(12): This sequence may encompass 1-4 "Gly Gly Ser" repeating units
GGSGGSGGSGGSEKAAKAEEAARPP

SEQ ID NO: 8 - protein, 25 aa, Artificial Sequence
  Description of Artificial Sequence: Synthetic peptide
  SITE (14)..(25): This sequence may encompass 1-4 "Gly Gly Ser" repeating units
EKAAKAEEAARPPGGSGGSGGSGGS

SEQ ID NO: 9 - protein, 11 aa, Artificial Sequence
  Description of Artificial Sequence: Synthetic peptide
EKAAKAEEAAR

SEQ ID NO: 10 - protein, 12 aa, Artificial Sequence
  Description of Artificial Sequence: Synthetic peptide
EKAAKAEEAARP

SEQ ID NO: 11 - protein, 13 aa, Artificial Sequence
  Description of Artificial Sequence: Synthetic peptide
EKAAKAEEAARPP

SEQ ID NO: 12 - protein, 14 aa, Artificial Sequence
  Description of Artificial Sequence: Synthetic peptide
GGSEKAAKAEEAAR

SEQ ID NO: 13 - protein, 15 aa, Artificial Sequence
  Description of Artificial Sequence: Synthetic peptide
GGSEKAAKAEEAARP

SEQ ID NO: 14 - protein, 16 aa, Artificial Sequence
  Description of Artificial Sequence: Synthetic peptide
GGSEKAAKAEEAARPP

SEQ ID NO: 15 - protein, 26 aa, Unknown
  Description of Unknown: T4 Fibritin trimerization domain sequence
GYIPEAPRDGQAYVRKDGEWVLLSTF

SEQ ID NO: 16 - protein, 6 aa, Artificial Sequence
  Description of Artificial Sequence: Synthetic peptide
LPETGG

SEQ ID NO: 17 - protein, 8 aa, Artificial Sequence
  Description of Artificial Sequence: Synthetic 8xHis tag
HHHHHHHH

SEQ ID NO: 18 - protein, 48 aa, Artificial Sequence
  Description of Artificial Sequence: Synthetic polypeptide
LEVLFQGPGHHHHHHHHSAWSHPQFEKGGGSGGGGSGGSAWSHPQFEK

SEQ ID NO: 19 - protein, 47 aa, Artificial Sequence
  Description of Artificial Sequence: Synthetic polypeptide
SAWSHPQFEKGGGSGGGGSGGSAWSHPQFEKHHHHHHHHLEVLFQGP

SEQ ID NO: 20 - protein, 4 aa, Artificial Sequence
  Description of Artificial Sequence: Synthetic peptide
GSGS

SEQ ID NO: 21 - protein, 5 aa, Artificial Sequence
  Description of Artificial Sequence: Synthetic peptide
  See specification as filed for detailed description of substitutions and preferred embodiments
GGGGG

SEQ ID NO: 22 - protein, 9 aa, Artificial Sequence
  Description of Artificial Sequence: Synthetic peptide
GSGLPETGG

SEQ ID NO: 23 - protein, 19 aa, Mus sp.
MGWSCIILFLVATATGVHA

SEQ ID NO: 24 - protein, 30 aa, Bos sp.
MDSKGSSQKGSRLLLLLVVSNLLLPQGVLA

SEQ ID NO: 25 - protein, 24 aa, Artificial Sequence
  Description of Artificial Sequence: Synthetic peptide
MPMGSLQPLATLYLLGMLVASVLA

SEQ ID NO: 26 - protein, 13 aa, Artificial Sequence
  Description of Artificial Sequence: Synthetic peptide
MFVFLVLLPLVSS

SEQ ID NO: 27 - protein, 6 aa, Artificial Sequence
  Description of Artificial Sequence: Synthetic peptide
LPSTGG

SEQ ID NO: 28 - protein, 8 aa, Artificial Sequence
  Description of Artificial Sequence: Synthetic peptide
LEVLFQGP

SEQ ID NO: 29 - protein, 9 aa, Artificial Sequence
  Description of Artificial Sequence: Synthetic peptide
  SITE (1)..(9): This sequence may encompass 1-3 "Gly Ser Gly" repeating units
GSGGSGGSG

SEQ ID NO: 30 - protein, 4 aa, Artificial Sequence
  Description of Artificial Sequence: Synthetic peptide
EPEA

SEQ ID NO: 31 - protein, 31 aa, Artificial Sequence
  Description of Artificial Sequence: Synthetic polypeptide
SAWSHPQFEKGGGSGGGGSGGSAWSHPQFEK

SEQ ID NO: 32 - protein, 6 aa, Artificial Sequence
  Description of Artificial Sequence: Synthetic peptide
  MOD_RES (3)..(3): Any amino acid
LPXTGG

SEQ ID NO: 33 - protein, 10 aa, Artificial Sequence
  Description of Artificial Sequence: Synthetic peptide
SAWSHPQFEK

SEQ ID NO: 34 - protein, 5 aa, Artificial Sequence
  Description of Artificial Sequence: Synthetic peptide
  MOD_RES (3)..(3): Any amino acid
LPXTG

SEQ ID NO: 35 - protein, 5 aa, Artificial Sequence
  Description of Artificial Sequence: Synthetic peptide
GGGGG

SEQ ID NO: 36 - protein, 263 aa, Artificial Sequence
  Description of Artificial Sequence: Synthetic polypeptide
MGWSCIILFLVATATGVHATNLCPFGEVFNATRFASVYAWNRKRISNCVADYSVLYNSASFSTFKCYGVSPTKLNDLCFTNVYADSFVIRGDEVRCIAPGQTGKICDYNYKLPDDFTGCVIAWNSNNLDSKVGGNYNYLYRLFRKSNLKPFERDISTEIYQAGSTPCNGVEGFNCYFPLQSYGFQPTNGVGYQPYRVVVLSFELLHAPATVCGPGSGLPETGGLEVLFQGPGSAWSHPQFEKGGGSGGGGSGGSAWSHPQFEK

SEQ ID NO: 37 - protein, 9 aa, Artificial Sequence
  Description of Artificial Sequence: Synthetic peptide
  MOD_RES (6)..(6): Any amino acid
GSGLPXTGG

SEQ ID NO: 38 - protein, 7 aa, Artificial Sequence
  Description of Artificial Sequence: Synthetic peptide
  MOD_RES (3)..(3): Any amino acid
  MOD_RES (6)..(7): May be absent
LPXTGGG

SEQ ID NO: 39 - protein, 7 aa, Artificial Sequence
  Description of Artificial Sequence: Synthetic peptide
  MOD_RES (3)..(3): Any amino acid
  MOD_RES (7)..(7): May be absent
LPXTGGG

SEQ ID NO: 40 - protein, 7 aa, Artificial Sequence
  Description of Artificial Sequence: Synthetic peptide
  MOD_RES (3)..(3): Any amino acid
LPXTGGG

SEQ ID NO: 41 - protein, 12 aa, Artificial Sequence
  Description of Artificial Sequence: Synthetic peptide
  MOD_RES (3)..(3): E or S
LPXTGGGGGGSG

SEQ ID NO: 42 - protein, 9 aa, Artificial Sequence
  Description of Artificial Sequence: Synthetic peptide
  MOD_RES (3)..(3): E or S
LPXTGGGGG

SEQ ID NO: 43 - protein, 10 aa, Artificial Sequence
  Description of Artificial Sequence: Synthetic peptide
  MOD_RES (6)..(6): Any amino acid
  MOD_RES (9)..(10): May be absent
GSGLPXTGGG

SEQ ID NO: 44 - protein, 10 aa, Artificial Sequence
  Description of Artificial Sequence: Synthetic peptide
  MOD_RES (6)..(6): Any amino acid
  MOD_RES (10)..(10): May be absent
GSGLPXTGGG

SEQ ID NO: 45 - protein, 10 aa, Artificial Sequence
  Description of Artificial Sequence: Synthetic peptide
  MOD_RES (6)..(6): Any amino acid
GSGLPXTGGG

SEQ ID NO: 46 - protein, 12 aa, Artificial Sequence
  Description of Artificial Sequence: Synthetic peptide
  MOD_RES (6)..(6): E or S
GSGLPXTGGGGG

SEQ ID NO: 47 - protein, 30 aa, Artificial Sequence
  Description of Artificial Sequence: Synthetic polypeptide
  SITE (1)..(30): This sequence may encompass 1-10 "Gly Gly Ser" repeating units
GGSGGSGGSGGSGGSGGSGGSGGSGGSGGS

SEQ ID NO: 48 - protein, 6 aa, Artificial Sequence
  Description of Artificial Sequence: Synthetic 6xHis tag
HHHHHH

SEQ ID NO: 49 - DNA, 22 bp, Artificial Sequence
  Description of Artificial Sequence: Synthetic primer
atattgcagcagtacgcacaca

SEQ ID NO: 50 - DNA, 26 bp, Artificial Sequence
  Description of Artificial Sequence: Synthetic primer
acaggtacgttaatagttaatagcgt

SEQ ID NO: 51 - DNA, 17 bp, Artificial Sequence
  Description of Artificial Sequence: Synthetic probe
atccttactgcgcttcg

SEQ ID NO: 52 - DNA, 23 bp, Artificial Sequence
  Description of Artificial Sequence: Synthetic primer
cgatctcttgtagatctgttctc

SEQ ID NO: 53 - DNA, 26 bp, Artificial Sequence
  Description of Artificial Sequence: Synthetic probe
acactagccatccttactgcgcttcg

SEQ ID NO: 54 - DNA, 20 bp, Artificial Sequence
  Description of Artificial Sequence: Synthetic primer
ggtgaaccaagacgcagtat

SEQ ID NO: 55 - DNA, 25 bp, Artificial Sequence
  Description of Artificial Sequence: Synthetic probe
taaccagaatggagaacgcagtggg

SEQ ID NO: 56 - protein, 1273 aa, Severe acute respiratory syndrome coronavirus 2
MFVFLVLLPLVSSQCVNLTTRTQLPPAYTNSFTRGVYYPDKVFRSSVLHSTQDLFLPFFSNVTWFHAIHVSGTNGTKRFDNPVLPFNDGVYFASTEKSNIIRGWIFGTTLDSKTQSLLIVNNATNVVIKVCEFQFCNDPFLGVYYHKNNKSWMESEFRVYSSANNCTFEYVSQPFLMDLEGKQGNFKNLREFVFKNIDGYFKIYSKHTPINLVRDLPQGFSALEPLVDLPIGINITRFQTLLALHRSYLTPGDSSSGWTAGAAAYYVGYLQPRTFLLKYNENGTITDAVDCALDPLSETKCTLKSFTVEKGIYQTSNFRVQPTESIVRFPNITNLCPFGEVFNATRFASVYAWNRKRISNCVADYSVLYNSASFSTFKCYGVSPTKLNDLCFTNVYADSFVIRGDEVRQIAPGQTGKIADYNYKLPDDFTGCVIAWNSNNLDSKVGGNYNYLYRLFRKSNLKPFERDISTEIYQAGSTPCNGVEGFNCYFPLQSYGFQPTNGVGYQPYRVVVLSFELLHAPATVCGPKKSTNLVKNKCVNFNFNGLTGTGVLTESNKKFLPFQQFGRDIADTTDAVRDPQTLEILDITPCSFGGVSVITPGTNTSNQVAVLYQDVNCTEVPVAIHADQLTPTWRVYSTGSNVFQTRAGCLIGAEHVNNSYECDIPIGAGICASYQTQTNSPRRARSVASQSIIAYTMSLGAENSVAYSNNSIAIPTNFTISVTTEILPVSMTKTSVDCTMYICGDSTECSNLLLQYGSFCTQLNRALTGIAVEQDKNTQEVFAQVKQIYKTPPIKDFGGFNFSQILPDPSKPSKRSFIEDLLFNKVTLADAGFIKQYGDCLGDIAARDLICAQKFNGLTVLPPLLTDEMIAQYTSALLAGTITSGWTFGAGAALQIPFAMQMAYRFNGIGVTQNVLYENQKLIANQFNSAIGKIQDSLSSTASALGKLQDVVNQNAQALNTLVKQLSSNFGAISSVLNDILSRLDKVEAEVQIDRLITGRLQSLQTYVTQQLIRAAEIRASANLAATKMSECVLGQSKRVDFCGKGYHLMSFPQSAPHGVVFLHVTYVPAQEKNFTTAPAICHDGKAHFPREGVFVSNGTHWFVTQRNFYEPQIITTDNTFVSGNCDVVIGIVNNTVYDPLQPELDSFKEELDKYFKNHTSPDVDLGDISGINASVVNIQKEIDRLNEVAKNLNESLIDLQELGKYEQYIKWPWYIWLGFIAGLIAIVMVTIMLCCMTSCCSCLKGCCSCGSCCKFDEDDSEPVLKGVKLHYT

SEQ ID NO: 57 - protein, 1269 aa, Severe acute respiratory syndrome-related coronavirus
MFVFLVLLPLVSSQCVNLTTRTQLPPAYTNSSTRGVYYPDKVFRSSVLHLTQDLFLPFFSNVTWFHAIHVSGTNGIKRFDNPVLPFNDGVYFASTEKSNIIRGWIFGTTLDSKTQSLLIVNNATNVVIKVCEFQFCNDPFLGVYYHKNNKSWMESEFRVYSSANNCTFEYVSQPFLMDLEGKQGNFKNLREFVFKNIDGYFKIYSKHTPINLVRDLPPGFSALEPLVDLPIGINITRFQTLLALHRSYLTPGDSSSGWTAGAAAYYVGYLQPRTFLLKYNENGTITDAVDCALDPLSETKCTLKSFTVEKGIYQTSNFRVQPTDSIVRFPNITNLCPFGEVFNATTFASVYAWNRKRISNCVADYSVLYNSTSFSTFKCYGVSPTKLNDLCFTNVYADSFVITGDEVRQIAPGQTGKIADYNYKLPDDFTGCVIAWNSKHIDAKEGGNFNYLYRLFRKANLKPFERDISTEIYQAGSKPCNGQTGLNCYYPLYRYGFYPTDGVGHQPYRVVVLSFELLNAPATVCGPKKSTNLVKNKCVNFNFNGLTGTGVLTESNKKFLPFQQFGRDIADTTDAVRDPQTLEILDITPCSFGGVSVITPGTNASNQVAVLYQDVNCTEVPVAIHADQLTPTWRVYSTGSNVFQTRAGCLIGAEHVNNSYECDIPIGAGICASYQTQTNSRSVASQSIIAYTMSLGAENSVAYSNNSIAIPTNFTISVTTEILPVSMTKTSVDCTMYICGDSTECSNLLLQYGSFCTQLNRALTGIAVEQDKNTQEVFAQVKQIYKTPPIKDFGGFNFSQILPDPSKPSKRSFIEDLLFNKVTLADAGFIKQYGDCLGDIAARDLICAQKFNGLTVLPPLLTDEMIAQYTSALLAGTITSGWTFGAGAALQIPFAMQMAYRFNGIGVTQNVLYENQKLIANQFNSAIGKIQDSLSSTASALGKLQDVVNQNAQALNTLVKQLSSNFGAISSVLNDILSRLDKVEAEVQIDRLITGRLQSLQTYVTQQLIRAAEIRASANLAATKMSECVLGQSKRVDFCGKGYHLMSFPQSAPHGVVFLHVTYVPAQEKNFTTAPAICHDGKAHFPREGVFVSNGTHWFVTQRNFYEPQIITTDNTFVSGSCDVVIGIVNNTVYDPLQPELDSFKEELDKYFKNHTSPDVDLGDISGINASVVNIQKEIDRLNEVAKNLNESLIDLQELGKYEQYIKWPWYIWLGFIAGLIAIIMVTIMLCCMTSCCSCLKGCCSCGSCCKFDEDDSEPVLKGVKLHYT

SEQ ID NO: 58 - protein, 1269 aa, Betacoronavirus sp.
  MOD_RES (86)..(86): Any amino acid
  MOD_RES (515)..(515): Any amino acid
MFVFLFVLPLVSSQCVNLTTRTGIPPGYTNSSTRGVYYPDKVFRSSILHLTQDLFLPFFSNVTWFNTIHLNYQGGFKKFDNPVLPXNDGVYFASTEKSNIIRGWIFGTTLDARTQSLLIVNNATNVVIKVCEFQFCTDPFLGVYYHNNNKTWVENEFRVYSSANNCTFEYISQPFLMDLEGKQGNFKNLREFVFKNVDGYFKIYSKHTPIDLVRDLPRGFAALEPLVDLPIGINITRFQTLLALHRSYLTPGKLESGWTTGAAAYYVGYLQQRTFLLSYNQNGTITDAVDCSLDPLSETKCTLKSLTVEKGIYQTSNFRVQPTISIVRFPNITNLCPFGEVFNASKFASVYAWNRKRISNCVADYSVLYNSTSFSTFKCYGVSPTKLNDLCFTNVYADSFVVKGDEVRQIAPGQTGVIADYNYKLPDDFTGCVIAWNSVKQDALTGGNYGYLYRLFRKSKLKPFERDISTEIYQAGSTPCNGQVGLNCYYPLERYGFHPTTGVNYQPFRVVVLSXELLNGPATVCGPKLSTTLVKDKCVNFNFNGLTGTGVLTTSKKQFLPFQQFGRDISDTTDAVRDPQTLEILDITPCSFGGVSVITPGTNTSNQVAVLYQDVNCTEVPMAIHAEQLTPAWRVYSAGANVFQTRAGCLVGAEHVNNSYECDIPVGAGICASYHSMSSFRSVNQRSIIAYTMSLGAENSVAYSNNSIAIPTNFTISVTTEILPVSMTKTSVDCTMYICGDSIECSNLLLQYGSFCTQLNRALTGIAVEQDKNTQEVFAQVKQIYKTPPIKDFGGFNFLQILPDPSKPSKRSFIEDLLFNKVTLADAGFIKQYGDCLGDIAARDLICAQKFNGLTVLPPLLTDEMIAQYTSALLAGTITSGWTFGAGAALQIPFAMQMAYRFNGIGVTQNVLYENQKLIANQFNSAIGKIQDSLSSTASALGKLQDVVNQNAQALNTLVKQLSSNFGAISSVLNDILSRLDKVEAEVQIDRLITGRLQSLQTYVTQQLIRAAEIRASANLAATKMSECVLGQSKRVDFCGKGYHLMSFPQSAPHGVVFLHVTYVPAQEKNFTTAPAICHEGKAHFPREGVFVSNGTHWFITQRNFYEPQIITTDNTFVSGSCDVVIGIVNNTVYDPLQPELDSFKEELDKYFKNHTSPDVDLGDISGINASVVNIQKEIDRLNEVAKNLNESLIDLQELGKYEQYIKWPWYIWLGFIAGLIAIIMVTIMLCCMTSCCSCLKGCCSCGSCCKFDEDDSEPVLKGVKLHYT

SEQ ID NO: 59 - protein, 1267 aa, Betacoronavirus sp.
MFVFLFVLPLVSSQCVNLTTRTGIPPGYTNSSTRGVYYPDKVFRSSILHLTQDLFLPFFSNVTWFNTITYQGGSKKFDNPVLPFNDGVYFASTEKSNIIRGWIFGTTLDARTQSLLIVNNATNVVIKVCEFQFCTDPFLGVYYHNNNKTWVENEFRVYSSANNCTFEYISQPFLMDLEGKQGNFKNLREFVFKNVDGYFKIYSKHTPIDLVRDLPRGFAALEPLVDLPIGINITRFQTLLALHRSYLTPGKLESGWTTGAAAYYVGYLQQRTFLLSYNQNGTITDAVDCSLDPLSETKCTLKSLTVEKGIYQTSNFRVQPTISIVRFPNITNLCPFGEVFNASKFASVYAWNRKRISNCVADYSVLYNSTSFSTFKCYGVSPTKLNDLCFTNVYADSFVVKGDEVRQIAPGQTGVIADYNYKLPDDFTGCVIAWNSVKQDALTGDNYGYLYRLFRKSKLKPFERDISTEIYQAGSTPCNGQVGLNCYYPLERYGFHPTTGVNYQPFRVVVLSFELLNGPATVCGPKLSTTLVKDKCVNFNFNGLTGTGVLTTSKKQFLPFQQFGRDISDTTDAVRDPQTLEILDITPCSFGGVSVITPGTNTSNQVAVLYQDVNCTEVPMAIHAEQLTPAWRVYSAGANVFQTRAGCLVGAEHVNNSYECDIPVGAGICASYHSMSSFRSVNQRSIIAYTMSLGAENSVAYSNNSIAIPTNFTISVTTEILPVSMTKTSVDCTMYICGDSIECSNLLLQYGSFCTQLNRALTGIAVEQDKNTQEVFAQVKQIYKTPPIKDFGGFNFSQILPDPSKPSKRSFIEDLLFNKVTLADAGFIKQYGDCLGDIAARDLICAQKFNGLTVLPPLLTDEMIAQYTSALLAGTITSGWTFGAGAALQIPFAMQMAYRFNGIGVTQNVLYENQKLIANQFNSAIGKIQDSLSSTASALGKLQDVVNQNAQALNTLVKQLSSNFGAISSVLNDILSRLDKVEAEVQIDRLITGRLQSLQTYVTQQLIRAAEIRASANLAATKMSECVLGQSKRVDFCGKGYHLMSFPQSAPHGVVFLHVTYVPAQEKNFTTAPAICHEGKAHFPREGVFVSNGTHWFITQRNFYEPQIITTDNTFVSGSCDVVIGIVNNTVYDPLQPELDSFKEELDKYFKNHTSPDVDLGDISGINASVVNIQKEIDRLNEVAKNLNESLIDLQELGKYEQYIKWPWYIWLGFIAGLIAIIMVTIMLCCMTSCCSCLKGCCSCGSCCKFDEDDSEPVLKGVKLHYT

SEQ ID NO: 60 - protein, 1267 aa, Betacoronavirus sp.
MFVFLFVLPLVSSQCVNLTTRTGIPPGYTNSSTRGVYYPDKVFRSSILHLTQDLFLPFFSNVTWFNTINYQGGFKKFDNPVLPFNDGVYFASTEKSNIIRGWIFGTTLDARTQSLLIVNNATNVVIKVCEFQFCTDPFLGVYYHNNNKTWVENEFRVYSSANNCTFEYISQPFLMDLEGKQGNFKNLREFVFKNVDGYFKIYSKHTPIDLVRDLPRGFAALEPLVDLPIGINITRFQTLLALHRSYLTPGKLESGWTTGAAAYYVGYLQQRTFLLSYNQNGTITDAVDCSLDPLSETKCTLKSLTVEKGIYQTSNFRVQPTISIVRFPNITNLCPFGEVFNASKFASVYAWNRKRISNCVADYSVLYNSTSFSTFKCYGVSPTKLNDLCFTNVYADSFVVKGDEVRQIAPGQTGVIADYNYKLPDDFTGCVIAWNSVKQDALTGGNYGYLYRLFRKSKLKPFERDISTEIYQAGSTPCNGQVGLNCYYPLERYGFHPTTGVNYQPFRVVVLSFELLNGPATVCGPKLSTTLVKDKCVNFNFNGLTGTGVLTTSKKQFLPFQQFGRDISDTTDAVRDPQTLEILDITPCSFGGVSVITPGTNTSNQVAVLYQDVNCTEVPMAIHAEQLTPAWRVYSAGANVFQTRAGCLVGAEHVNNSYECDIPVGAGICASYHSMSSFRSVNQRSIIAYTMSLGAENSVAYSNNSIAIPTNFTISVTTEILPVSMTKTSVDCTMYICGDSIECSNLLLQYGSFCTQLNRALTGIAVEQDKNTQEVFAQVKQIYKTPPIKDFGGFNFSQILPDPSKPSKRSFIEDLLFNKVTLADAGFIKQYGDCLGDIAARDLICAQKFNGLTVLPPLLTDEMIAQYTSALLAGTITSGWTFGAGAALQIPFAMQMAYRFNGIGVTQNVLYENQKLIANQFNSAIGKIQDSLSSTASALGKLQDVVNQNAQALNTLVKQLSSNFGAISSVLNDILSRLDKVEAEVQIDRLITGRLQSLQTYVTQQLIRAAEIRASANLAATKMSECVLGQSKRVDFCGKGYHLMSFPQSAPHGVVFLHVTYVPAQEKNFTTAPAICHEGKAHFPREGVFVSNGTHWFITQRNFYEPQIITTDNTFVSGSCDVVIGIVNNTVYDPLQPELDSFKEELDKYFKNHTSPDVDLGDISGINASVVNIQKEIDRLNEVAKNLNESLIDLQELGKYEQYIKWPWYIWLGFIAGLIAIIMVTIMLCCMTSCCSCLKGCCSCGSCCKFDEDDSEPVLKGVKLHYT

SEQ ID NO: 61 - protein, 1265 aa, Betacoronavirus sp.
MFVFLFVLPLVSSQCVNLTTRTGIQPGYTNSSTRGVYYPDKVFRSSILHLTQDLFLPFFSNVTWFNTINYQGGFKKFDNPVLPFNDGVYFASTEKSNIIRGWIFGTTLDARTQSLLIVNNATNVVIKVCEFQFCTDPFLGVYYHNNNKTWVENEFRVYSSANNCTFEYISQPFLMDLEGKQGNFKNLREFVFKNVDGYFKIYSKHTPIDLVRDLPRGFAALEPLVDLPIGINITRFQTLLALHRSYLTPGKLESGWTTGAAAYYVGYLQQRTFLLSYNQNGTITDAVDCSLDPLSETKCTLKSLTVEKGIYQTSNFRVQPTISIVRFPNITNLCPFGEVFNASKFASVYAWNRKRISNCVADYSVLYNSTSFSTFKCYGVSPTKLNDLCFTNVYADSFVVKGDEVRQIAPGQTGVIADYNYKLPDDFTGCVIAWNSVKQDALTGGNYLYRLFRKSKLKPFERDISTEIYQAGSTPCNGQVGLNCYYPLERYGFHPTTGVNYQPFRVVVLSFELLNGPATVCGPKLSTTLVKDKCVNFNFNGLTGTGVLTTSKKQFLPFQQFGRDISDTTDAVRDPQTLEILDITPCSFGGVSVITPGTNTSNQVAVLYQDVNCTEVPMAIHAEQLTPAWRVYSAGANVFQTRAGCLVGAEHVNNSYECDIPVGAGICASYHSMSSLRSVNQRSIIAYTMSLGAENSVAYSNNSIAIPTNFTISVTTEILPVSMTKTSVDCTMYICGDSIECSNLLLQYGSFCTQLNRALTGIAVEQDKNTQEVFAQVKQIYKTPPIKDFGGFNFSQILPDPSKPSKRSFIEDLLFNKVTLADAGFIKQYGDCLGDIAARDLICAQKFNGLTVLPPLLTDEMIAQYTSALLAGTITSGWTFGAGAALQIPFAMQMAYRFNGIGVTQNVLYENQKLIANQFNSAIGKIQDSLSSTASALGKLQDVVNQNAQALNTLVKQLSSNFGAISSVLNDILSRLDKVEAEVQIDRLITGRLQSLQTYVTQQLIRAAEIRASANLAATKMSECVLGQSKRVDFCGKGYHLMSFPQSAPHGVVFLHVTYVPAQEKNFTTAPAICHEGKAHFPREGVFVSNGTHWFITQRNFYEPQIITTDNTFVSGSCDVVIGIVNNTVYDPLQPELDSFKEELDKYFKNHTSPDVDLGDISGINASVVNIQKEIDRLNEVAKNLNESLIDLQELGKYEQYIKWPWYIWLGFIAGLIAIIMVTIMLCCMTSCCSCLKGCCSCGSCCKFDEDDSEPVLKGVKLHYT

SEQ ID NO: 62 - protein, 1267 aa, Betacoronavirus sp.
MFVFLFVLPLVSSQCVNLTTRTGIPPGYTNSSTRGVYYPDKVFRSSILHLTQDLFLPFFSNVTWFNTINYQGGFKKFDNPVLPFNDGVYFASTEKSNIIRGWIFGTTLDARTQSLLIVNNATNVVIKVCEFQFCTDPFLGVYYHNNNKTWVENEFRVYSSANNCTFEYISQPFLMDLEGKQGNFKNLREFVFKNVDGYFKIYSKHTPIDLVRDLPRGFAALEPLVDLPIGINITRFQTLLALHRSYLTPGNLESGWTTGAAAYYVGYLQQRTFLLSYNQNGTITDAVDCSLDPLSETKCTLKSLTVEKGIYQTSNFRVQPTISIVRFPNITNLCPFGEVFNASKFASVYAWNRKRISNCVADYSVLYNSTSFSTFKCYGVSPTKLNDLCFTNVYADSFVVKGDEVRQIAPGQTGVIADYNYKLPDDFTGCVIAWNSVKQDALTGGNYGYLYRLFRKSKLKPFERDISTEIYQAGSTPCNGQVGLNCYYPLERYGFHPTTGVNYQPFRVVVLSFELLNGPATVCGPKLSTTLVKDKCVNFNFNGLTGTGVLTTSKKQFLPFQQFGRDISDTTDAVRDPQTLEILDITPCSFGGVSVITPGTNTSNQVAVLYQDVNCTEVPMAIHAEQLTPAWRVYSAGANVFQTRAGCLVGAEHVNNSYECDIPVGAGICASYHSMSSLRSVNQRSIIAYTMSLGAENSVAYSNNSIAIPTNFTISVTTEILPVSMTKTSVDCTMYICGDSIECSNLLLQYGSFCTQLNRALTGIAVEQDKNTQEVFAQVKQIYKTPPIKDFGGFNFSQILPDPSKPSKRSFIEDLLFNKVTLADAGFIKQYGDCLGDIAARDLICAQKFNGLTVLPPLLTDEMIAQYTSALLAGTITSGWTFGAGAALQIPFAMQMAYRFNGIGVTQNVLYENQKLIANQFNSAIGKIQDSLSSTASALGKLQDVVNQNAQALNTLVKQLSSNFGAISSVLNDILSRLDKVEAEVQIDRLITGRLQSLQTYVTQQLIRAAEIRASANLAATKMSECVLGQSKRVDFCGKGYHLMSFPQSAPHGVVFLHVTYVPAQEKNFTTAPAICHEGKAHFPREGVFVSNGTHWFITQRNFYEPQIITTDNTFVSGSCDVVIGIVNNTVYDPLQPELDSFKEELDKYFKNHTSPDVDLGDISGINASVVNIQKEIDRLNEVAKNLNESPIDLQELGKYEQYIKWPWYIWLGFIAGLIAIIMVTIMLCCMTSCCSCLKGCCSCGSCCKFDEDDSEPVLKGVKLHYT

SEQ ID NO: 63 - protein, 1254 aa, Severe acute respiratory syndrome-related coronavirus
LLVLVFATLVSSYTIEKCLDFDDRTPPANTQFLSSHRGVYYPDDIFRSNVLHLVQDHFLPFDSNVTRFITFGLNFDNPIIPFRDGIYFAATEKSNVIRGWVFGSTMNNKSQSVIIMNNSTNLVIRACNFELCDNPFFVVLKSNNTQIPSYIFNNAFNCTFEYVSKDFNLDLGEKPGNFKDLREFVFRNKDGFLHVYSGYQPISAASGLPTGFNALKPIFKLPLGINITNFRTLLTAFPPRPDYWGTSAAAYFVGYLKPTTFMLKYDENGTITDAVDCSQNPLAELKCSVKSFEIDKGIYQTSNFRVAPSKEVVRFPNITNLCPFGEVFNATTFPSVYAWERKRISNCVADYSVLYNSTSFSTFKCYGVSATKLNDLCFSNVYADSFVVKGDDVRQIAPGQTGVIADYNYKLPDDFLGCVLAWNTNSKDSSTSGNYNYLYRWVRRSKLNPYERDLSNDIYSPGGQSCSAVGPNCYNPLRPYGFFTTAGVGHQPYRVVVLSFELLNAPATVCGPKLSTDLIKNQCVNFNFNGLTGTGVLTPSSKRFQPFQQFGRDVSDFTDSVRDPKTSEILDISPCSFGGVSVITPGTNTSSEVAVLYQDVNCTDVPVAIHADQLTPSWRVYSTGNNVFQTQAGCLIGAEHVDTSYECDIPIGAGICASYHTVSSLRSTSQKSIVAYTMSLGADSSIAYSNNTIAIPTNFSISITTEVMPVSMAKTSVDCNMYICGDSTECANLLLQYGSFCTQLNRALSGIAVEQDRNTREVFAQVKQMYKTPTLKDFGGFNFSQILPDPLKPTKRSFIEDLLFNKVTLADAGFMKQYGECLGDINARDLICAQKFNGLTVLPPLLTDDMIAAYTAALVSGTATAGWTFGAGAALQIPFAMQMAYRFNGIGVTQNVLYENQKQIANQFNKAISQIQESLTTTSTALGKLQDVVNQNAQALNTLVKQLSSNFGAISSVLNDILSRLDKVEAEVQIDRLITGRLQSLQTYVTQQLIRAAEIRASANLAATKMSECVLGQSKRVDFCGKGYHLMSFPQAAPHGVVFLHVTYVPSQERNFTTAPAICHEGKAYFPREGVFVFNGTSWFITQRNFFSPQIITTDNTFVSGSCDVVIGIINNTVYDPLQPELDSFKEELDKYFKNHTSPDVDLGDISGINASVVNIQKEIDRLNEVAKNLNESLIDLQELGKYEQYIKWPWYVWLGFIAGLIAIVMVTILLCCMTSCCSCLKGACSCGSCCKFDEDDSEPVLKGVKLHYT

SEQ ID NO: 64 - protein, 1255 aa, Severe acute respiratory syndrome-related coronavirus
MFIFLLFLTLTSGSDLDRCTTFDDVQAPNYTQHTSSMRGVYYPDEIFRSDTLYLTQDLFLPFYSNVTGFHTINHTFDNPVIPFKDGIYFAATEKSNVVRGWVFGSTMNNKSQSVIIINNSTNVVIRACNFELCDNPFFAVSKPMGTQTHTMIFDNAFNCTFEYISDAFSLDVSEKSGNFKHLREFVFKNKDGFLYVYKGYQPIDVVRDLPSGFNTLKPIFKLPLGINITNFRAILTAFSPAQDTWGTSAAAYFVGYLKPTTFMLKYDENGTITDAVDCSQNPLAELKCSVKSFEIDKGIYQTSNFRVVPSGDVVRFPNITNLCPFGEVFNATKFPSVYAWERKKISNCVADYSVLYNSTFFSTFKCYGVSATKLNDLCFSNVYADSFVVKGDDVRQIAPGQTGVIADYNYKLPDDFMGCVLAWNTRNIDATSTGNYNYKYRYLRHGKLRPFERDISNVPFSPDGKPCTPPALNCYWPLNDYGFYTTTGIGYQPYRVVVLSFELLNAPATVCGPKLSTDLIKNQCVNFNFNGLTGTGVLTPSSKRFQPFQQFGRDVSDFTDSVRDPKTSEILDISPCSFGGVSVITPGTNASSEVAVLYQDVNCTDVSTAIHADQLTPAWRIYSTGNNVFQTQAGCLIGAEHVDTSYECDIPIGAGICASYHTVSLLRSTSQKSIVAYTMSLGADSSIAYSNNTIAIPTNFSISITTEVMPVSMAKTSVDCNMYICGDSTECANLLLQYGSFCTQLNRALSGIAAEQDRNTREVFAQVKQMYKTPTLKYFGGFNFSQILPDPLKPTKRSFIEDLLFNKVTLADAGFMKQYGECLGDINARDLICAQKFNGLTVLPPLLTDDMIAAYTAALVSGTATAGWTFGAGAALQIPFAMQMAYRFNGIGVTQNVLYENQKQIANQFNKAISQIQESLTTTSTALGKLQDVVNQNAQALNTLVKQLSSNFGAISSVLNDILSRLDKVEAEVQIDRLITGRLQSLQTYVTQQLIRAAEIRASANLAATKMSECVLGQSKRVDFCGKGYHLMSFPQAAPHGVVFLHVTYVPSQERNFTTAPAICHEGKAYFPREGVFVFNGTSWFITQRNFFSPQIITTDNTFVSGNCDVVIGIINNTVYDPLQPELDSFKEELDKYFKNHTSPDVDLGDISGINASVVNIQKEIDRLNEVAKNLNESLIDLQELGKYEQYIKWPWYVWLGFIAGLIAIVMVTILLCCMTSCCSCLKGACSCGSCCKFDEDDSEPVLKGVKLHYT

SEQ ID NO: 65 - protein, 1255 aa, Severe acute respiratory syndrome-related coronavirus
MFIFLLFLTLTSGSDLDRCTTFDDVQAPNYTQHTSSMRGVYYPDEIFRSDTLYLTQDLFLPFYSNVTGFHTINHTFDNPVIPFKDGIYFAATEKSNVVRGWVFGSTMNNKSQSVIIINNSTNVVIRACNFELCDNPFFAVSKPMGTQTHTMIFDNAFNCTFEYISDAFSLDVSEKSGNFKHLREFVFKNKDGFLYVYKGYQPIDVVRDLPSGFNTLKPIFKLPLGINITNFRAILTAFLPAQDTWGTSAAAYFVGYLKPTTFMLKYDENGTITDAVDCSQNPLAELKCSVKSFEIDKGIYQTSNFRVVPSRDVVRFPNITNLCPFGEVFNATKFPSVYAWERKRISNCVADYSVLYNSTFFSTFKCYGVSATKLNDLCFSNVYADSFVVKGDDVRQIAPGQTGVIADYNYKLPDDFMGCVLAWNTRNIDATSTGNYNYKYRYLRHGKLRPFERDISNVPFSPDGKPCTPPALNCYWPLNDYGFYTTTGIGYQPYRVVVLSFELLNAPATVCGPKLSTDLIKNQCVNFNFNGLTGTGVLTPSSKRFQPFQQFGRDVSDFTDSVRDPKTSEILDISPCSFGGVSVITPGTNASSEVAVLYQDVNCTDVSTAIHADQLTPAWRIYSTGNNVFQTQAGCLIGAEHVDTSYECDIPIGAGICASYHTVSLLRSTSQKSIVAYTMSLGADSSIAYSNNTIAIPTNFSISITTEVMPVSMAKTSVDCNMYICGDSTECANLLLQYGSFCTQLNRALSGIAAEQDRNTREVFAQVKQMYKTPTLKDFGGFNFSQILPDPLKPTKRSFIEDLLFNKVTLADAGFMKQYGECLGDINARDLICAQKFNGLTVLPPLLTDDMIAAYTAALVSGTATAGWTFGAGAALQIPFAMQMAYRFNGIGVTQNVLYENQKQIANQFNKAISQIQESLTTTSTALGKLQDVVNQNAQALNTLVKQLSSNFGAISSVLNDILSRLDKVEAEVQIDRLITGRLQSLQTYVTQQLIRAAEIRASANLAATKMSECVLGQSKRVDFCGKGYHLMSFPQAAPHGVVFLHVTYVPSQERNFTTAPAICHEGKAYFPREGVFVFNGTSWFITQRNFFSPQIITTDNTFVSGNCDVVIGIINNTVYDPLQPELDSFKEELDKYFKNHTSPDVDLGDISGINASVVNIQEEIDRLNEVAKNLNESLIDLQELGKYEQYIKWPWYVWLGFIAGLIAIVMVTILLCCMTSCCSCLKGACSCGSCCKFDEDDSEPVLKGVKLHYT

SEQ ID NO: 66 - protein, 1255 aa, Severe acute respiratory syndrome-related coronavirus
MFIFLLFLTLTSGSDLDRCTTFDDVQAPNYTQHTSSMRGVYYPDEIFRSDTLYLTQDLFLPFYSNVTGFHTINHTFDNPVIPFKDGIYFAATEKSNVVRGWVFGSTMNNKSQSVIIINNSTNVVIRACNFELCDNPFFAVSKPMGTQTHTMIFDNAFNCTFEYISDAFSLDVSEKSGNFKHLREFVFKNKDGFLYVYKGYQPIDVVRDLPSGFNTLKPIFKLPLGIKITNFRAILTAFLPAQDTWGTSAAAYFVGYLKPTKFMLKYDENGTITDAVDCSQNPLAELKCSVKSFEIDKGIYQTSNFRVVPSGDVVRFPNITNLCPFGEVFNATKFPSVYAWERKRISNCVADYSVLYNSTSFSTFKCYGVSATKLNDLCFSNVYADSFVVKGDDVRQIAPGQTGVIADYNYKLPDDFMGCVLAWNTRNIDATSTGNYNYKYRYLRHGKLRPFERDISNVPFSPDGKPCTPPALNCYWPLKDYGFYTTSGIGYQPYRVVVLSFELLNAPATVCGPKLSTDLIKNQCVNFNFNGLTGTGVLTPSSKRFQPFQQFGRDVSDFTDSVRDPKTSEILDISPCSFGGVSVITPGTNASSEVAVLYQDVNCTDVPTAIHADQLTPAWRIYSTGNNVFQTQAGCLIGAEHVDTSYECDIPIGAGICASYHTVSSLRSTSQKSIVAYTMSLGADSSIAYSNNTIAIPTNFLISITTEVMPVSMAKTSVDCNMYICGDSTECANLLLQYGSFCAQLNRALSGIAVEQDRNTREVFAQVKQMYKTPTLKDFGGFNFSQILPDPLKPTKRSFIEDLLFNKVTLADAGFMKQYGECLGDINARDLICAQKFNGLTVLPPLLTDDMIAAYTAALVSGTATAGWTFGAGAALQIPFAMQMAYRFNGIGVAQNVLYENQKQIANQFNKAISQIQESLTTTSTALGKLQDVVNQNAQALNTLVKQLSSNFGAISSVLNDILSRLDKVEAEVQIDRLITGRLQSLQTYVTQQLIRAAEIRASANLAATKMSECVLGQSKRVDFCGKGYHLMSFPQAAPHGVVFLHVTYVPSQERNFTTAPAICHEGKAYFPREGVFVFNGTSWFITQRNFFSPQIITTDNTFVSGNCDVVIGIINNTVYDPLQPELDSFKEELDKYFKNHTSPDVDLGDISGINASVVNIQEEIDRLNEVAKNLNESLIDLQELGKYEQYIKWPWYVWLGFIAGLIAIVMVTILLCCMTSCCSCLKGACSCGSCCKFDEDDSEPVLKGVKLHYT

SEQ ID NO: 67 - protein, 1255 aa, Severe acute respiratory syndrome-related coronavirus
MFIFLLFLTLTSGSDLDRCTTFDDVQAPNYTQHTSSMRGVYYPDEIFRSDTLYLTQDLFLPFYSNVTGFHTINHTFGNPVIPFKDGIYFAATEKSNVVRGWVFGSTMNNKSQSVIIINNSTNVVIRACNFELCDNPFFAVSKPMGTQTHTMIFDNAFNCTFEYISDAFSLDVSEKSGNFKHLREFVFKNKDGFLYVYKGYQPIDVVRDLPSGFNTLKPIFKLPLGINITNFRAILTAFSPAQDIWGTSAAAYFVGYLKPTTFMLKYDENGTITDAVDCSQNPLAELKCSVKSFEIDKGIYQTSNFRVVPSGDVVRFPNITNLCPFGEVFNATKFPSVYAWERKKISNCVADYSVLYNSTFFSTFKCYGVSATKLNDLCFSNVYADSFVVKGDDVRQIAPGQTGVIADYNYKLPDDFMGCVLAWNTRNIDATSTGNYNYKYRYLRHGKLRPFERDISNVPFSPDGKPCTPPALNCYWPLNDYGFYTTTGIGYQPYRVVVLSFELLNAPATVCGPKLSTDLIKNQCVNFNFNGLTGTGVLTPSSKRFQPFQQFGRDVSDFTDSVRDPKTSEILDISPCAFGGVSVITPGTNASSEVAVLYQDVNCTDVSTAIHADQLTPAWRIYSTGNNVFQTQAGCLIGAEHVDTSYECDIPIGAGICASYHTVSLLRSTSQKSIVAYTMSLGADSSIAYSNNTIAIPTNFSISITTEVMPVSMAKTSVDCNMYICGDSTECANLLLQYGSFCTQLNRALSGIAAEQDRNTREVFAQVKQMYKTPTLKYFGGFNFSQILPDPLKPTKRSFIEDLLFNKVTLADAGFMKQYGECLGDINARDLICAQKFNGLTVLPPLLTDDMIAAYTAALVSGTATAGWTFGAGAALQIPFAMQMAYRFNGIGVTQNVLYENQKQIANQFNKAISQIQESLTTTSTALGKLQDVVNQNAQALNTLVKQLSSNFGAISSVLNDILSRLDKVEAEVQIDRLITGRLQSLQTYVTQQLIRAAEIRASANLAATKMSECVLGQSKRVDFCGKGYHLMSFPQAAPHGVVFLHVTYVPSQERNFTTAPAICHEGKAYFPREGVFVFNGTSWFITQRNFFSPQIITTDNTFVSGNCDVVIGIINNTVYDPLQPELDSFKEELDKYFKNHTSPDVDLGDISGINASVVNIQKEIDRLNEVAKNLNESLIDLQELGKYEQYIKWPWYVWLGFIAGLIAIVMVTILLCCMTSCCSCLKGACSCGSCCKFDEDDSEPVLKGVKLHYT

SEQ ID NO: 68 - DNA, 918 bp, Artificial Sequence
  Description of Artificial Sequence: Synthetic polynucleotide
atgcctatgggatctctgcagcctctggccacactgtacctgctgggaatgctggtggctagcgtgctggccagagttcagcctaccgagagcatcgtgcggttccccaacatcaccaatctgtgccctttcggcgaggtgttcaatgccaccagattcgccagcgtgtacgcctggaaccggaagagaatcagcaactgcgtggccgactacagcgtgctgtacaacagcgccagcttcagcaccttcaagtgctacggcgtgtcccctaccaagctgaacgacctgtgcttcaccaatgtgtacgccgacagcttcgtgatccggggagatgaagtgcggcagattgcccctggacagacaggcaagatcgccgattacaactacaagctgcccgacgacttcaccggctgtgtgatcgcctggaatagcaacaacctggacagcaaagtcggcggcaactacaactacctgtaccggctgttccggaagtccaacctgaagcctttcgagcgggacatcagcaccgaaatctaccaggccggcagcaccccttgcaatggcgtggaaggcttcaactgctacttcccactgcagtcctacggcttccagcctacaaacggcgtgggctaccagccttacagagtggtggtgctgagcttcgagctgctgcatgctcctgccacagtgtgcggccctaagaaaagcaccaacctggtcaagaacaaatgcgtgaacttcctgcctgagaccggaggactggaggtgctgttccagggcccaggccatcaccaccatcaccaccatcatagcgcctggtcccacccccagttcgagaagggcggcggtagtggagggggcggatctggcggctcagcttggagccacccccagttcgaaaagtgataatgaagatct

SEQ ID NO: 69 - DNA, 918 bp, Artificial Sequence
  Description of Artificial Sequence: Synthetic polynucleotide
atgcctatgggatctctgcagcctctggccacactgtacctgctgggaatgctggtggctagcgtgctggccagagttcagcctaccgagagcatcgtgcggttccccaacatcaccaatctgtgccctttcggcgaggtgttcaatgccaccagattcgccagcgtgtacgcctggaaccggaagagaatcagcaactgcgtggccgactacagcgtgctgtacaacagcgccagcttcagcaccttcaagtgctacggcgtgtcccctaccaagctgaacgacctgtgcttcaccaatgtgtacgccgacagcttcgtgatccggggagatgaagtgcggcagattgcccctggacagacaggcaagatcgccgattacaactacaagctgcccgacgacttcaccggctgtgtgatcgcctggaatagcaacaacctggacagcaaagtcggcggcaactacaactacctgtaccggctgttccggaagtccaacctgaagcctttcgagcgggacatcagcaccgaaatctaccaggccggcagcaccccttgcaatggcgtgaaaggcttcaactgctacttcccactgcagtcctacggcttccagcctacaaacggcgtgggctaccagccttacagagtggtggtgctgagcttcgagctgctgcatgctcctgccacagtgtgcggccctaagaaaagcaccaacctggtcaagaacaaatgcgtgaacttcctgcctgagaccggaggactggaggtgctgttccagggcccaggccatcaccaccatcaccaccatcatagcgcctggtcccacccccagttcgagaagggcggcggtagtggagggggcggatctggcggctcagcttggagccacccccagttcgaaaagtgataatgaagatct

SEQ ID NO: 70 - DNA, 918 bp, Artificial Sequence
  Description of Artificial Sequence: Synthetic polynucleotide
atgcctatgggatctctgcagcctctggccacactgtacctgctgggaatgctggtggctagcgtgctggccagagttcagcctaccgagagcatcgtgcggttccccaacatcaccaatctgtgccctttcggcgaggtgttcaatgccaccagattcgccagcgtgtacgcctggaaccggaagagaatcagcaactgcgtggccgactacagcgtgctgtacaacagcgccagcttcagcaccttcaagtgctacggcgtgtcccctaccaagctgaacgacctgtgcttcaccaatgtgtacgccgacagcttcgtgatccggggagatgaagtgcggcagattgcccctggacagacaggcaatatcgccgattacaactacaagctgcccgacgacttcaccggctgtgtgatcgcctggaatagcaacaacctggacagcaaagtcggcggcaactacaactacctgtaccggctgttccggaagtccaacctgaagcctttcgagcgggacatcagcaccgaaatctaccaggccggcagcaccccttgcaatggcgtggaaggcttcaactgctacttcccactgcagtcctacggcttccagcctacaaacggcgtgggctaccagccttacagagtggtggtgctgagcttcgagctgctgcatgctcctgccacagtgtgcggccctaagaaaagcaccaacctggtcaagaacaaatgcgtgaacttcctgcctgagaccggaggactggaggtgctgttccagggcccaggccatcaccaccatcaccaccatcatagcgcctggtcccacccccagttcgagaagggcggcggtagtggagggggcggatctggcggctcagcttggagccacccccagttcgaaaagtgataatgaagatct

SEQ ID NO: 71 - DNA, 918 bp, Artificial Sequence
  Description of Artificial Sequence: Synthetic polynucleotide
atgcctatgggatctctgcagcctctggccacactgtacctgctgggaatgctggtggctagcgtgctggccagagttcagcctaccgagagcatcgtgcggttccccaacatcaccaatctgtgccctttcggcgaggtgttcaatgccaccagattcgccagcgtgtacgcctggaaccggaagagaatcagcaactgcgtggccgactacagcgtgctgtacaacagcgccagcttcagcaccttcaagtgctacggcgtgtcccctaccaagctgaacgacctgtgcttcaccaatgtgtacgccgacagcttcgtgatccggggagatgaagtgcggcagattgcccctggacagacaggcaagatcgccgattacaactacaagctgcccgacgacttcaccggctgtgtgatcgcctggaatagcaacaacctggacagcaaagtcggcggcaactacaactacctgtaccggctgttccggaagtccaacctgaagcctttcgagcgggacatcagcaccgaaatctaccaggccggcagcaccccttgcaatggcgtggaaggcttcaactgctacttcccactgcagtcctacggcttccagcctacaaatggcgtgggctaccagccttacagagtggtggtgctgagcttcgagctgctgcatgctcctgccacagtgtgcggccctaagaaaagcaccaacctggtcaagaacaaatgcgtgaacttcctgcctgagaccggaggactggaggtgctgttccagggcccaggccatcaccaccatcaccaccatcatagcgcctggtcccacccccagttcgagaagggcggcggtagtggagggggcggatctggcggctcagcttggagccacccccagttcgaaaagtgataatgaagatct

SEQ ID NO: 72 - DNA, 918 bp, Artificial Sequence
  Description of Artificial Sequence: Synthetic polynucleotide
atgcctatgggatctctgcagcctctggccacactgtacctgctgggaatgctggtggctagcgtgctggccagagttcagcctaccgagagcatcgtgcggttccccaacatcaccaatctgtgccctttcggcgaggtgttcaatgccaccagattcgccagcgtgtacgcctggaaccggaagagaatcagcaactgcgtggccgactacagcgtgctgtacaacagcgccagcttcagcaccttcaagtgctacggcgtgtcccctaccaagctgaacgacctgtgcttcaccaatgtgtacgccgacagcttcgtgatccggggagatgaagtgcggcagattgcccctggacagacaggcaatatcgccgattacaactacaagctgcccgacgacttcaccggctgtgtgatcgcctggaatagcaacaacctggacagcaaagtcggcggcaactacaactacctgtaccggctgttccggaagtccaacctgaagcctttcgagcgggacatcagcaccgaaatctaccaggccggcagcaccccttgcaatggcgtgaaaggcttcaactgctacttcccactgcagtcctacggcttccagcctacaaatggcgtgggctaccagccttacagagtggtggtgctgagcttcgagctgctgcatgctcctgccacagtgtgcggccctaagaaaagcaccaacctggtcaagaacaaatgcgtgaacttcctgcctgagaccggaggactggaggtgctgttccagggcccaggccatcaccaccatcaccaccatcatagcgcctggtcccacccccagttcgagaagggcggcggtagtggagggggcggatctggcggctcagcttggagccacccccagttcgaaaagtgataatgaagatct

SEQ ID NO: 73 - DNA, 3930 bp, Artificial Sequence
  Description of Artificial Sequence: Synthetic polynucleotide
atgcctatgggatctctgcagcctctggccacactgtacctgctgggaatgctggtggctagcgtgctggcccagtgtgtgaacctgaccaccagaacacagctgcctccagcctacaccaacagctttaccagaggcgtgtactaccccgacaaggtgttcagatccagcgtgctgcactctacccaggacctgttcctgcctttcttcagcaacgtgacctggttccacgccatccacgtgtccggcaccaatggcaccaagagattcgacaaccccgtgctgcccttcaacgacggggtgtactttgccagcaccgagaagtccaacatcatcagaggctggatcttcggcaccacactggacagcaagacccagagcctgctgatcgtgaacaacgccaccaacgtggtcatcaaagtgtgcgagttccagttctgcaacgaccccttcctgggcgtctactaccacaagaacaacaagagctggatggaaagcgagttccgggtgtacagcagcgccaacaactgcaccttcgagtacgtgtcccagcctttcctgatggacctggaaggcaagcagggcaacttcaagaacctgcgcgagttcgtgttcaagaacatcgacggctacttcaagatctacagcaagcacacccctatcaacctcgtgcgggatctgcctcagggcttctctgctctggaacccctggtggatctgcccatcggcatcaacatcacccggtttcagacactgctggccctgcacagaagctacctgacacctggcgatagcagcagcggatggacagctggtgccgccgcttactatgtgggctacctgcagcctagaaccttcctgctgaagtacaacgagaacggcaccatcaccgacgccgtggattgtgcccttgatcctctgagcgagacaaagtgcaccctgaagtccttcaccgtggaaaagggcatctaccagaccagcaacttccgggtgcagcccaccgaatccatcgtgcggttccccaatatcaccaatctgtgccccttcggcgaggtgttcaatgccaccagattcgcctctgtgtacgcctggaaccggaagcggatcagcaattgcgtggccgactactccgtgctgtacaactccgccagcttcagcaccttcaagtgctacggcgtgtcccctaccaagctgaacgacctgtgcttcacaaacgtgtacgccgacagcttcgtgatccggggagatgaagtgcggcagattgcccctggacagacaggcaagatcgccgactacaactacaagctgcccgacgacttcaccggctgtgtgattgcctggaacagcaacaacctggactccaaagtcggcggcaactacaattacctgtaccggctgttccggaagtccaatctgaagcccttcgagcgggacatctccaccgagatctatcaggccggcagcaccccttgtaacggcgtggaaggcttcaactgctacttcccactgcagtcctacggctttcagcccacaaatggcgtgggctatcagccctacagagtggtggtgctgagcttcgaactgctgcatgcccctgccacagtgtgcggccctaagaaaagcaccaatctcgtgaagaacaaatgcgtgaacttcaacttcaacggcctgaccggcaccggcgtgctgacagagagcaacaagaagttcctgccattccagcagtttggccgggatatcgccgataccacagacgccgttagagatccccagacactggaaatcctggacatcaccccttgcagcttcggcggagtgtctgtgatcacccctggcaccaacaccagcaatcaggtggcagtgctgtaccaggacgtgaactgtaccgaagtgcccgtggccattcacgccgatcagctgacacctacatggcgggtgtactccaccggcagcaatgtgtttcagaccagagccggctgtctgatcggagccgagcacgtgaacaatagctacgagtgcgacatccccatcggcgctggcatctgtgccagctaccagacacagacaaacagccctggcagcgcctcttctgtggccagccagagcatcattgcctacacaatgtctctgggcgccgagaacagcgtggcctactccaacaactctatcgctatccccaccaacttcaccatcagcgtgaccacagagatcctgcctgtgtccatgaccaagaccagcgtggactgcaccatgtacatctgcggcgattccaccgagtgctccaacctgctgctgcagtacggcagcttctgcacccagctgaatagagccctgacagggatcgccgtggaacaggacaagaacacccaagaggtgttcgcccaagtgaagcagatctacaagacccctcctatcaaggacttcggcggcttcaatttcagccagattctgcccgatcctagcaagcccagcaagcggagcttcatcgaggacctgctgttcaacaaagtgacactggccgacgccggcttcatcaagcagtatggcgattgtctgggcgacattgccgccagggatctgatttgcgcccagaagtttaacggactgacagtgctgcctcctctgctgaccgatgagatgatcgcccagtacacatctgccctgctggccggcacaatcacaagcggctggacatttggagctggcgccgctctgcagatcccctttgctatgcagatggcctaccggttcaacggcatcggagtgacccagaatgtgctgtacgagaaccagaagctgatcgccaaccagttcaacagcgccatcggcaagatccaggacagcctgagcagcacagcaagcgccctgggaaagctgcaggacgtggtcaaccagaatgcccaggcactgaacaccctggtcaagcagctgtcctccaacttcggcgccatcagctctgtgctgaacgatatcctgagcagactggaccctcctgaggccgaggtgcagatcgacagactgatcacaggcagactgcagagcctccagacatacgtgacccagcagctgatcagagccgccgagattagagcctctgccaatctggccgccaccaagatgtctgagtgtgtgctgggccagagcaagagagtggacttttgcggcaagggctaccacctgatgagcttccctcagtctgcccctcacggcgtggtgtttctgcacgtgacatatgtgcccgctcaagagaagaatttcaccaccgctccagccatctgccacgacggcaaagcccactttcctagagaaggcgtgttcgtgtccaacggcacccattggttcgtgacacagcggaacttctacgagccccagatcatcaccaccgacaacaccttcgtgtctggcaactgcgacgtcgtgatcggcattgtgaacaataccgtgtacgaccctctgcagcccgagctggacagcttcaaagaggaactggacaagtactttaagaaccacacaagccccgacgtggacctgggcgatatcagcggaatcaatgccagcgtcgtgaacatccagaaagagatcgaccggctgaacgaggtggccaagaatctgaacgagagcctgatcgacctgcaagaactggggaagtacgagcaaggcagcggctacattcccgaggctcctagagatggccaggcctacgttagaaaggacggcgagtgggtcctgctgagcacctttctgggaagatctctgcctgagaccggaggactggaggtgctgttccagggcccaggccatcaccaccatcaccaccatcatagcgcctggtcccacccccagttcgagaagggcggcggtagtggagggggcggatctggcggctcagcttggagccacccccagttcgaaaagtgataatgaagatct

SEQ ID NO: 74 - DNA, 1155 bp, Artificial Sequence
  Description of Artificial Sequence: Synthetic polynucleotide
atggattctaagggcagcagccagaagggctccagactgctgctgcttctggtggtgtccaacctcctgctgcctcaaggcgttctggcctctgcttggagccatcctcagttcgagaaaggcggaggatctggcggaggtggaagtggtggatctgcttggtcacacccacagtttgagaagcaccaccatcatcaccatcaccacctggaagtgctgtttcaaggccctggcagcggcagccagtgtgtgaatctgaccacaagaacccagctgcctccagcctacaccaacagctttaccagaggcgtgtactaccccgacaaggtgttcagatccagcgtgctgcactctacccaggacctgttcctgcctttcttcagcaacgtgacctggttccacgccatccacgtgtccggcaccaatggcaccaagagattcgacaaccccgtgctgcctttcaacgacggggtgtactttgccagcaccgagaagtccaacatcatcagaggctggatcttcggcaccacactggacagcaagacccagagcctgctgatcgtgaacaacgccaccaacgtggtcatcaaagtgtgcgagttccagttctgcaacgaccccttcctgggcgtctactatcacaagaacaacaagagctggatggaaagcgagttccgggtgtacagcagcgccaacaactgcaccttcgagtacgtgtcccagcctttcctgatggacctggaaggcaagcagggcaacttcaagaacctgcgcgagttcgtgttcaagaacatcgacggctacttcaagatctacagcaagcacacccctatcaacctcgtgcgggatctgcctcagggcttctctgctctggaacccctggtggacctgcctatcggcatcaacatcacccggtttcagaccctgctggccctgcacagaagctaccttacacctggcgatagcagcagcggatggacagctggtgccgccgcttactatgtgggctacctgcagcctagaaccttcctgctgaagtacaacgagaacggcaccatcacagacgccgtggactgtgcccttgatcctctgagcgagacaaagtgcaccctgaagtccttcacactgcctagcaccggcggctgataaggatcc

SEQ ID NO: 75 - DNA, 858 bp, Artificial Sequence
  Description of Artificial Sequence: Synthetic polynucleotide
atgggctggtcctgcatcatcctgtttctggtggccacagccacaggggtgcacgccgtggaatgcgatttcagccctctgctgtctggcacccctcctcaggtgtacaacttcaagcggctggtgttcaccaactgcaactacaacctgaccaagctgctgagcctgttcagcgtgaacgacttcacctgtagccagatcagccctgccgccattgccagcaactgttacagcagcctgatcctggactacttcagctaccctctgagcatgaagtccgacctgagcgtgtcaagcgccggacctatcagccagttcaactacaagcagagcttcagcaaccctacctgcctgattctggccaccgtgcctcacaatctgaccaccatcaccaagcctctgaagtacagctacatcaacaagtgcagcagactgctgagcgacgacagaaccgaagtgccccagctggtcaacgccaaccagtacagcccttgcgtgtccatcgtgcctagcaccgtttgggaggacggcgactactaccggaagcagctgtctccacttgaaggcggaggatggctggtggcctctggatctacagtggccatgacagagcagctgcagatgggctttggcatcaccgtgcagtacggcaccgacaccaatagcgtgtgccctaagctggaaggcagcggcttgcctgaaacaggcggactggaagtgctgtttcaaggccctggcagccatcaccatcatcaccactctgcttggagccatccacagttcgagaaaggcggtggatctggcggaggtggaagcggaggatctgcttggtcacaccctcagtttgagaagtgatga

SEQ ID NO: 76 - DNA, 900 bp, Artificial Sequence
  Description of Artificial Sequence: Synthetic polynucleotide
atgggctggtcctgcatcatcctgtttctggtggccacagccacaggggtgcacgcccgggtgcagcccaccatcagcatcgtgcggttccccaatatcaccaatctgtgccccttcggcgaggtgttcaacgccagcaagtttgcctctgtgtacgcctggaaccggaagcggatcagcaattgcgtggccgactacagcgtgctgtacaacagcaccagcttcagcaccttcaagtgctacggcgtgtcccctaccaagctgaacgacctgtgcttcacaaacgtgtacgccgacagcttcgtggtcaagggcgacgaagttcggcagattgcccctggacagacaggcgtgatcgccgattacaactacaagctgcccgacgacttcaccggctgtgtgattgcctggaacagcgtgaagcaggatgccctgacaggcggcaattacggctacctgtaccggctgttcagaaagagcaagctgaagcccttcgagcgggacatctccaccgagatctatcaggccggcagcaccccttgcaatggccaagttggcctgaactgctactaccctctggaaagatacggctttcaccccaccaccggcgtgaactaccagccattcagagtggtggtgctgagcttcgagctgctgaatggacctgccacagtgtgcggccctaagctgtctacaaccctggtcaaggataagtgcgtgaacttcggctcaggcctgcctgagaccggaggactggaagtcctgtttcaaggccctggcagccaccaccaccatcaccacagcgcctggtcccacccccagttcgagaagggcggcggtagtggagggggcggatctggcggctcagcttggagccacccccagttcgaaaagtgatga

SEQ ID NO: 77 - DNA, 897 bp, Artificial Sequence
  Description of Artificial Sequence: Synthetic polynucleotide
atgggctggtcctgcatcatcctgtttctggtggccacagccacaggggtgcacgccagagtggcccctagcaaagaagtcgtgcggttccccaatatcaccaatctgtgccccttcggcgaggtgttcaacgccaccacatttccctctgtgtacgcctgggagagaaagcggatcagcaactgcgtggccgactacagcgtgctgtacaacagcacctcctttagcaccttcaagtgctacggcgtgtccgccaccaagctgaacgatctgtgcttctccaacgtgtacgccgacagcttcgtggtcaagggcgacgatgtgcggcagattgctcctggacagacaggcgtgatcgccgattacaactacaagctgcctgacgacttcctgggctgtgtgctggcctggaacaccaacagcaaggacagctccaccagcggcaactacaactacctgtacagatgggtccgacgcagcaagctgaatccctacgagagggacctgagcaacgacatctatagccctggcggccagagctgttctgccgtgggacccaattgctacaaccctctgaggccctacggcttctttaccacagctggcgtgggccaccagccttacagagtggtggtgctgtcattcgagctgctgaatgcccctgccacagtgtgtggccctaagctgtctaccgacctgatcaagaaccagtgcgtgaacttcggctcaggcctgcctgagaccggaggactggaagtcctgtttcaaggccctggcagccaccaccaccatcaccacagcgcctggtcccacccccagttcgagaagggcggcggtagtggagggggcggatctggcggctcagcttggagccacccccagttcgaaaagtgatga

SEQ ID NO: 78 - DNA, 897 bp, Artificial Sequence
  Description of Artificial Sequence: Synthetic polynucleotide
atgggctggtcctgcatcatcctgtttctggtggccacagccacaggggtgcacgccagagtggtgcccagcagagatgtcgtgcggttccccaatatcaccaatctgtgccccttcggcgaggtgttcaacgccacaaagttccccagcgtgtacgcctgggagagaaagcggatcagcaactgcgtggccgactacagcgtgctgtacaactccaccttcttcagcaccttcaagtgctacggcgtgtccgccaccaagctgaacgatctgtgcttcagcaatgtgtacgccgacagcttcgtggtcaagggcgacgatgttcgccagattgcccctggacagacaggcgtgatcgccgattacaactacaagctgcctgacgacttcatgggctgcgtgctggcctggaacaccagaaacatcgatgccaccagcaccggcaactacaattacaagtacagatacctgcggcacggcaagctgcggcctttcgagagggatatctccaacgtgccattcagccccgacggcaagccatgtacacctccagcactgaactgctactggcccctgaacgactacggcttttacaccaccacaggcatcggctatcagccctatagagtggtggtcctgtcctttgagctgctgaatgcccctgccacagtgtgcggacctaagctgtctaccgacctgatcaagaaccagtgcgtgaacttcggctcaggcctgcctgagaccggaggactggaagtcctgtttcaaggccctggcagccaccaccaccatcaccacagcgcctggtcccacccccagttcgagaagggcggcggtagtggagggggcggatctggcggctcagcttggagccacccccagttcgaaaagtgatga

SEQ ID NO: 79 - DNA, 840 bp, Artificial Sequence
  Description of Artificial Sequence: Synthetic polynucleotide
atgggctggtcctgcatcatcctgtttctggtggccacagccacaggggtgcacgccgtggaatgcgatttcagccctctgctgtctggcacccctcctcaggtgtacaacttcaagcggctggtgttcaccaactgcaactacaacctgaccaagctgctgagcctgttcagcgtgaacgacttcacctgtagccagatcagccctgccgccattgccagcaactgttacagcagcctgatcctggactacttcagctaccctctgagcatgaagtccgacctgagcgtgtcaagcgccggacctatcagccagttcaactacaagcagagcttcagcaaccctacctgcctgattctggccaccgtgcctcacaatctgaccaccatcaccaagcctctgaagtacagctacatcaacaagtgcagcagactgctgagcgacgacagaaccgaagtgccccagctggtcaacgccaaccagtacagcccttgcgtgtccatcgtgcctagcaccgtttgggaggacggcgactactaccggaagcagctgtctccacttgaaggcggaggatggctggtggcctctggatctacagtggccatgacagagcagctgcagatgggctttggcatcaccgtgcagtacggcaccgacaccaatagcgtgtgccctaagctggaaggatctggcctggaagtgctgtttcaaggccctggcagccatcaccatcatcaccactctgcttggagccatccacagttcgagaaaggcggtggatctggcggaggtggaagcggaggatctgcttggtcacaccctcagtttgagaagtgatga

SEQ ID NO: 80 - DNA, 864 bp, Artificial Sequence
  Description of Artificial Sequence: Synthetic polynucleotide
atggatagcaagggcagcagccagaagggctccagactgctgctgcttctggtggtgtccaacctcctgctgcctcaaggtgttctggctgtggaatgcgatttcagccctctgctgtctggcacccctcctcaggtgtacaacttcaagcggctggtgttcaccaactgcaactacaacctgaccaagctgctgagcctgttcagcgtgaacgacttcacctgtagccagatcagccctgccgccattgccagcaactgttacagcagcctgatcctggactacttcagctaccctctgagcatgaagtccgacctgagcgtgtcaagcgccggacctatcagccagttcaactacaagcagagcttcagcaaccctacctgcctgattctggccaccgtgcctcacaatctgaccaccatcaccaagcctctgaagtacagctacatcaacaagtgcagcagactgctgagcgacgacagaaccgaagtgccccagctggtcaacgccaaccagtacagcccttgcgtgtccatcgtgcctagcaccgtttgggaggacggcgactactaccggaagcagctgtctccacttgaaggcggaggatggctggtggcctctggatctacagtggccatgacagagcagctgcagatgggctttggcatcaccgtgcagtacggcaccgacaccaatagcgtgtgccctaagctggaactggaagtgctgtttcaaggccctggcagccatcaccatcatcaccactctgcttggagccatccacagttcgagaaaggcggtggatctggcggaggtggaagcggaggatctgcttggtcacaccctcagtttgagaagtgatga

SEQ ID NO: 81 - DNA, 858 bp, Artificial Sequence
  Description of Artificial Sequence: Synthetic polynucleotide
atgggctggtcctgcatcatcctgtttctggtggccacagccacaggggtgcacgcccatcaccatcatcaccactctgcttggagccatccacagttcgagaaaggcggtggatctggcggaggtggaagcggaggatctgcttggtcacaccctcagtttgagaagggcagcctggaagtgctgtttcaaggccctgtggaatgcgatttcagccctctgctgtctggcacccctcctcaggtgtacaacttcaagcggctggtgttcaccaactgcaactacaacctgaccaagctgctgagcctgttcagcgtgaacgacttcacctgtagccagatcagccctgccgccattgccagcaactgttacagcagcctgatcctggactacttcagctaccctctgagcatgaagtccgacctgagcgtgtcaagcgccggacctatcagccagttcaactacaagcagagcttcagcaaccctacctgcctgattctggccaccgtgcctcacaatctgaccaccatcaccaagcctctgaagtacagctacatcaacaagtgcagcagactgctgagcgacgacagaaccgaagtgccccagctggtcaacgccaaccagtacagcccttgcgtgtccatcgtgcctagcaccgtttgggaggacggcgactactaccggaagcagctgtctccacttgaaggcggaggatggctggtggcctctggatctacagtggccatgacagagcagctgcagatgggctttggcatcaccgtgcagtacggcaccgacaccaatagcgtgtgccctaagctggaaggcagcggcttgcctgaaacaggcggatgatga

SEQ ID NO: 82 - DNA, 3891 bp, Artificial Sequence
  Description of Artificial Sequence: Synthetic polynucleotide
atgttcgtgttcctggtgctcctgcctctggtgagcagccagtgtgtgaacctgaccaccagaacacagctgcctccagcctacaccaacagctttaccagaggcgtgtactaccccgacaaggtgttcagatccagcgtgctgcactctacccaggacctgttcctgcctttcttcagcaacgtgacctggttccacgccatccacgtgtccggcaccaatggcaccaagagattcgccaaccccgtgctgcccttcaacgacggggtgtactttgccagcaccgagaagtccaacatcatcagaggctggatcttcggcaccacactggacagcaagacccagagcctgctgatcgtgaacaacgccaccaacgtggtcatcaaagtgtgcgagttccagttctgcaacgaccccttcctgggcgtctactaccacaagaacaacaagagctggatggaaagcgagttccgggtgtacagcagcgccaacaactgcaccttcgagtacgtgtcccagcctttcctgatggacctggaaggcaagcagggcaacttcaagaacctgcgcgagttcgtgttcaagaacatcgacggctacttcaagatctacagcaagcacacccctatcaacctcgtgcggggtctgcctcagggcttctctgctctggaacccctggtggatctgcccatcggcatcaacatcacccggtttcagacactgcacgccctgcacagaagctacctgacacctggcgatagcagcagcggatggacagctggtgccgccgcttactatgtgggctacctgcagcctagaaccttcctgctgaagtacaacgagaacggcaccatcaccgacgccgtggattgtgcccttgatcctctgagcgagacaaagtgcaccctgaagtccttcaccgtggaaaagggcatctaccagaccagcaacttccgggtgcagcccaccgaatccatcgtgcggttccccaatatcaccaatctgtgccccttcggcgaggtgttcaatgccaccagattcgcctctgtgtacgcctggaaccggaagcggatcagcaattgcgtggccgactactccgtgctgtacaactccgccagcttcagcaccttcaagtgctacggcgtgtcccctaccaagctgaacgacctgtgcttcacaaacgtgtacgccgacagcttcgtgatccggggagatgaagtgcggcagattgcccctggacagacaggcaacatcgccgactacaactacaagctgcccgacgacttcaccggctgtgtgattgcctggaacagcaacaacctggactccaaagtcggcggcaactacaattacctgtaccggctgttccggaagtccaatctgaagcccttcgagcgggacatctccaccgagatctatcaggccggcagcaccccttgtaacggcgtgaaaggcttcaactgctacttcccactgcagtcctacggctttcagcccacatatggcgtgggctatcagccctacagagtggtggtgctgagcttcgaactgctgcatgcccctgccacagtgtgcggccctaagaaaagcaccaatctcgtgaagaacaaatgcgtgaacttcaacttcaacggcctgaccggcaccggcgtgctgacagagagcaacaagaagttcctgccattccagcagtttggccgggatatcgccgataccacagacgccgttagagatccccagacactggaaatcctggacatcaccccttgcagcttcggcggagtgtctgtgatcacccctggcaccaacaccagcaatcaggtggcagtgctgtaccagggcgtgaactgtaccgaagtgcccgtggccattcacgccgatcagctgacacctacatggcgggtgtactccaccggcagcaatgtgtttcagaccagagccggctgtctgatcggagccgagcacgtgaacaatagctacgagtgcgacatccccatcggcgctggcatctgtgccagctaccagacacagacaaacagccctggcagcgcctcttctgtggccagccagagcatcattgcctacacaatgtctctgggcgtggagaacagcgtggcctactccaacaactctatcgctatccccaccaacttcaccatcagcgtgaccacagagatcctgcctgtgtccatgaccaagaccagcgtggactgcaccatgtacatctgcggcgattccaccgagtgctccaacctgctgctgcagtacggcagcttctgcacccagctgaatagagccctgacagggatcgccgtggaacaggacaagaacacccaagaggtgttcgcccaagtgaagcagatctacaagacccctcctatcaaggacttcggcggcttcaatttcagccagattctgcccgatcctagcaagcccagcaagcggagccctatcgaggacctgctgttcaacaaagtgacactggccgacgccggcttcatcaagcagtatggcgattgtctgggcgacattgccgccagggatctgatttgcgcccagaagtttaacggactgacagtgctgcctcctctgctgaccgatgagatgatcgcccagtacacatctgccctgctggccggcacaatcacaagcggctggacatttggagctggccctgctctgcagatcccctttcctatgcagatggcctaccggttcaacggcatcggagtgacccagaatgtgctgtacgagaaccagaagctgatcgccaaccagttcaacagcgccatcggcaagatccaggacagcctgagcagcacacctagcgccctgggaaagctgcaggacgtggtcaaccagaatgcccaggcactgaacaccctggtcaagcagctgtcctccaacttcggcgccatcagctctgtgctgaacgatatcctgagcagactggaccctcctgaggccgaggtgcagatcgacagactgatcacaggcagactgcagagcctccagacatacgtgacccagcagctgatcagagccgccgagattagagcctctgccaatctggccgccaccaagatgtctgagtgtgtgctgggccagagcaagagagtggacttttgcggcaagggctaccacctgatgagcttccctcagtctgcccctcacggcgtggtgtttctgcacgtgacatatgtgcccgctcaagagaagaatttcaccaccgctccagccatctgccacgacggcaaagcccactttcctagagaaggcgtgttcgtgtccaacggcacccattggttcgtgacacagcggaacttctacgagccccagatcatcaccaccgacaacaccttcgtgtctggcaactgcgacgtcgtgatcggcattgtgaacaataccgtgtacgaccctctgcagcccgagctggacagcttcaaagaggaactggacaagtactttaagaaccacacaagccccgacgtggacctgggcgatatcagcggaatcaatgccagcgtcgtgaacatccagaaagagatcgaccggctgaacgaggtggccaagaatctgaacgagagcctgatcgacctgcaagaactggggaagtacgagcaaggcagcggctacattcccgaggctcctagagatggccaggcctacgttagaaaggacggcgagtgggtcctgctgagcacctttctgggaagatctctgcctgagaccggaggactggaggtgctgttccagggcccaggccatcaccaccatcaccaccatcatagcgcctggtcccacccccagttcgagaagggcggcggtagtggagggggcggatctggcggctcagcttggagccacccccagttcgaaaagtgataatga

SEQ ID NO: 83 - DNA, 3882 bp, Artificial Sequence
  Description of Artificial Sequence: Synthetic polynucleotide
atgttcgtgttcctggtgctcctgcctctggtgagcagccagtgtgtgaacctgaccaccagaacacagctgcctccagcctacaccaacagctttaccagaggcgtgtactaccccgacaaggtgttcagatccagcgtgctgcactctacccaggacctgttcctgcctttcttcagcaacgtgacctggttccacgccatccacgtgtccggcaccaatggcaccaagagattcgccaaccccgtgctgcccttcaacgacggggtgtactttgccagcaccgagaagtccaacatcatcagaggctggatcttcggcaccacactggacagcaagacccagagcctgctgatcgtgaacaacgccaccaacgtggtcatcaaagtgtgcgagttccagttctgcaacgaccccttcctgggcgtctactaccacaagaacaacaagagctggatggaaagcgagttccgggtgtacagcagcgccaacaactgcaccttcgagtacgtgtcccagcctttcctgatggacctggaaggcaagcagggcaacttcaagaacctgcgcgagttcgtgttcaagaacatcgacggctacttcaagatctacagcaagcacacccctatcaacctcgtgcggggtctgcctcagggcttctctgctctggaacccctggtggatctgcccatcggcatcaacatcacccggtttcagacactgcacagaagctacctgacacctggcgatagcagcagcggatggacagctggtgccgccgcttactatgtgggctacctgcagcctagaaccttcctgctgaagtacaacgagaacggcaccatcaccgacgccgtggattgtgcccttgatcctctgagcgagacaaagtgcaccctgaagtccttcaccgtggaaaagggcatctaccagaccagcaacttccgggtgcagcccaccgaatccatcgtgcggttccccaatatcaccaatctgtgccccttcggcgaggtgttcaatgccaccagattcgcctctgtgtacgcctggaaccggaagcggatcagcaattgcgtggccgactactccgtgctgtacaactccgccagcttcagcaccttcaagtgctacggcgtgtcccctaccaagctgaacgacctgtgcttcacaaacgtgtacgccgacagcttcgtgatccggggagatgaagtgcggcagattgcccctggacagacaggcaacatcgccgactacaactacaagctgcccgacgacttcaccggctgtgtgattgcctggaacagcaacaacctggactccaaagtcggcggcaactacaattacctgtaccggctgttccggaagtccaatctgaagcccttcgagcgggacatctccaccgagatctatcaggccggcagcaccccttgtaacggcgtgaaaggcttcaactgctacttcccactgcagtcctacggctttcagcccacatatggcgtgggctatcagccctacagagtggtggtgctgagcttcgaactgctgcatgcccctgccacagtgtgcggccctaagaaaagcaccaatctcgtgaagaacaaatgcgtgaacttcaacttcaacggcctgaccggcaccggcgtgctgacagagagcaacaagaagttcctgccattccagcagtttggccgggatatcgccgataccacagacgccgttagagatccccagacactggaaatcctggacatcaccccttgcagcttcggcggagtgtctgtgatcacccctggcaccaacaccagcaatcaggtggcagtgctgtaccagggcgtgaactgtaccgaagtgcccgtggccattcacgccgatcagctgacacctacatggcgggtgtactccaccggcagcaatgtgtttcagaccagagccggctgtctgatcggagccgagcacgtgaacaatagctacgagtgcgacatccccatcggcgctggcatctgtgccagctaccagacacagacaaacagccctggcagcgcctcttctgtggccagccagagcatcattgcctacacaatgtctctgggcgtggagaacagcgtggcctactccaacaactctatcgctatccccaccaacttcaccatcagcgtgaccacagagatcctgcctgtgtccatgaccaagaccagcgtggactgcaccatgtacatctgcggcgattccaccgagtgctccaacctgctgctgcagtacggcagcttctgcacccagctgaatagagccctgacagggatcgccgtggaacaggacaagaacacccaagaggtgttcgcccaagtgaagcagatctacaagacccctcctatcaaggacttcggcggcttcaatttcagccagattctgcccgatcctagcaagcccagcaagcggagccctatcgaggacctgctgttcaacaaagtgacactggccgacgccggcttcatcaagcagtatggcgattgtctgggcgacattgccgccagggatctgatttgcgcccagaagtttaacggactgacagtgctgcctcctctgctgaccgatgagatgatcgcccagtacacatctgccctgctggccggcacaatcacaagcggctggacatttggagctggccctgctctgcagatcccctttcctatgcagatggcctaccggttcaacggcatcggagtgacccagaatgtgctgtacgagaaccagaagctgatcgccaaccagttcaacagcgccatcggcaagatccaggacagcctgagcagcacacctagcgccctgggaaagctgcaggacgtggtcaaccagaatgcccaggcactgaacaccctggtcaagcagctgtcctccaacttcggcgccatcagctctgtgctgaacgatatcctgagcagactggaccctcctgaggccgaggtgcagatcgacagactgatcacaggcagactgcagagcctccagacatacgtgacccagcagctgatcagagccgccgagattagagcctctgccaatctggccgccaccaagatgtctgagtgtgtgctgggccagagcaagagagtggacttttgcggcaagggctaccacctgatgagcttccctcagtctgcccctcacggcgtggtgtttctgcacgtgacatatgtgcccgctcaagagaagaatttcaccaccgctccagccatctgccacgacggcaaagcccactttcctagagaaggcgtgttcgtgtccaacggcacccattggttcgtgacacagcggaacttctacgagccccagatcatcaccaccgacaacaccttcgtgtctggcaactgcgacgtcgtgatcggcattgtgaacaataccgtgtacgaccctctgcagcccgagctggacagcttcaaagaggaactggacaagtactttaagaaccacacaagccccgacgtggacctgggcgatatcagcggaatcaatgccagcgtcgtgaacatccagaaagagatcgaccggctgaacgaggtggccaagaatctgaacgagagcctgatcgacctgcaagaactggggaagtacgagcaaggcagcggctacattcccgaggctcctagagatggccaggcctacgttagaaaggacggcgagtgggtcctgctgagcacctttctgggaagatctctgcctgagaccggaggactggaggtgctgttccagggcccaggccatcaccaccatcaccaccatcatagcgcctggtcccacccccagttcgagaagggcggcggtagtggagggggcggatctggcggctcagcttggagccacccccagttcgaaaagtgataatga

SEQ ID NO: 84 - protein, 301 aa, Artificial Sequence
  Description of Artificial Sequence: Synthetic polypeptide
MPMGSLQPLATLYLLGMLVASVLARVQPTESIVRFPNITNLCPFGEVFNATRFASVYAWNRKRISNCVADYSVLYNSASFSTFKCYGVSPTKLNDLCFTNVYADSFVIRGDEVRQIAPGQTGKIADYNYKLPDDFTGCVIAWNSNNLDSKVGGNYNYLYRLFRKSNLKPFERDISTEIYQAGSTPCNGVEGFNCYFPLQSYGFQPTNGVGYQPYRVVVLSFELLHAPATVCGPKKSTNLVKNKCVNFLPETGGLEVLFQGPGHHHHHHHHSAWSHPQFEKGGGSGGGGSGGSAWSHPQFEK

SEQ ID NO: 85 - protein, 301 aa, Artificial Sequence
  Description of Artificial Sequence: Synthetic polypeptide
MPMGSLQPLATLYLLGMLVASVLARVQPTESIVRFPNITNLCPFGEVFNATRFASVYAWNRKRISNCVADYSVLYNSASFSTFKCYGVSPTKLNDLCFTNVYADSFVIRGDEVRQIAPGQTGKIADYNYKLPDDFTGCVIAWNSNNLDSKVGGNYNYLYRLFRKSNLKPFERDISTEIYQAGSTPCNGVKGFNCYFPLQSYGFQPTNGVGYQPYRVVVLSFELLHAPATVCGPKKSTNLVKNKCVNFLPETGGLEVLFQGPGHHHHHHHHSAWSHPQFEKGGGSGGGGSGGSAWSHPQFEK

SEQ ID NO: 86 - protein, 301 aa, Artificial Sequence
  Description of Artificial Sequence: Synthetic polypeptide
MPMGSLQPLATLYLLGMLVASVLARVQPTESIVRFPNITNLCPFGEVFNATRFASVYAWNRKRISNCVADYSVLYNSASFSTFKCYGVSPTKLNDLCFTNVYADSFVIRGDEVRQIAPGQTGNIADYNYKLPDDFTGCVIAWNSNNLDSKVGGNYNYLYRLFRKSNLKPFERDISTEIYQAGSTPCNGVEGFNCYFPLQSYGFQPTNGVGYQPYRVVVLSFELLHAPATVCGPKKSTNLVKNKCVNFLPETGGLEVLFQGPGHHHHHHHHSAWSHPQFEKGGGSGGGGSGGSAWSHPQFEK

SEQ ID NO: 87 - protein, 301 aa, Artificial Sequence
  Description of Artificial Sequence: Synthetic polypeptide
MPMGSLQPLATLYLLGMLVASVLARVQPTESIVRFPNITNLCPFGEVFNATRFASVYAWNRKRISNCVADYSVLYNSASFSTFKCYGVSPTKLNDLCFTNVYADSFVIRGDEVRQIAPGQTGNIADYNYKLPDDFTGCVIAWNSNNLDSKVGGNYNYLYRLFRKSNLKPFERDISTEIYQAGSTPCNGVKGFNCYFPLQSYGFQPTNGVGYQPYRVVVLSFELLHAPATVCGPKKSTNLVKNKCVNFLPETGGLEVLFQGPGHHHHHHHHSAWSHPQFEKGGGSGGGGSGGSAWSHPQFEK

SEQ ID NO: 88 - protein, 1305 aa, Artificial Sequence
  Description of Artificial Sequence: Synthetic polypeptide
MPMGSLQPLATLYLLGMLVASVLAQCVNLTTRTQLPPAYTNSFTRGVYYPDKVFRSSVLHSTQDLFLPFFSNVTWFHAIHVSGTNGTKRFDNPVLPFNDGVYFASTEKSNIIRGWIFGTTLDSKTQSLLIVNNATNVVIKVCEFQFCNDPFLGVYYHKNNKSWMESEFRVYSSANNCTFEYVSQPFLMDLEGKQGNFKNLREFVFKNIDGYFKIYSKHTPINLVRDLPQGFSALEPLVDLPIGINITRFQTLLALHRSYLTPGDSSSGWTAGAAAYYVGYLQPRTFLLKYNENGTITDAVDCALDPLSETKCTLKSFTVEKGIYQTSNFRVQPTESIVRFPNITNLCPFGEVFNATRFASVYAWNRKRISNCVADYSVLYNSASFSTFKCYGVSPTKLNDLCFTNVYADSFVIRGDEVRQIAPGQTGKIADYNYKLPDDFTGCVIAWNSNNLDSKVGGNYNYLYRLFRKSNLKPFERDISTEIYQAGSTPCNGVEGFNCYFPLQSYGFQPTNGVGYQPYRVVVLSFELLHAPATVCGPKKSTNLVKNKCVNFNFNGLTGTGVLTESNKKFLPFQQFGRDIADTTDAVRDPQTLEILDITPCSFGGVSVITPGTNTSNQVAVLYQDVNCTEVPVAIHADQLTPTWRVYSTGSNVFQTRAGCLIGAEHVNNSYECDIPIGAGICASYQTQTNSPGSASSVASQSIIAYTMSLGAENSVAYSNNSIAIPTNFTISVTTEILPVSMTKTSVDCTMYICGDSTECSNLLLQYGSFCTQLNRALTGIAVEQDKNTQEVFAQVKQIYKTPPIKDFGGFNFSQILPDPSKPSKRSFIEDLLFNKVTLADAGFIKQYGDCLGDIAARDLICAQKFNGLTVLPPLLTDEMIAQYTSALLAGTITSGWTFGAGAALQIPFAMQMAYRFNGIGVTQNVLYENQKLIANQFNSAIGKIQDSLSSTASALGKLQDVVNQNAQALNTLVKQLSSNFGAISSVLNDILSRLDPPEAEVQIDRLITGRLQSLQTYVTQQLIRAAEIRASANLAATKMSECVLGQSKRVDFCGKGYHLMSFPQSAPHGVVFLHVTYVPAQEKNFTTAPAICHDGKAHFPREGVFVSNGTHWFVTQRNFYEPQIITTDNTFVSGNCDVVIGIVNNTVYDPLQPELDSFKEELDKYFKNHTSPDVDLGDISGINASVVNIQKEIDRLNEVAKNLNESLIDLQELGKYEQGSGYIPEAPRDGQAYVRKDGEWVLLSTFLGRSLPETGGLEVLFQGPGHHHHHHHHSAWSHPQFEKGGGSGGGGSGGSAWSHPQFEK

SEQ ID NO: 89 - protein, 381 aa, Artificial Sequence
  Description of Artificial Sequence: Synthetic polypeptide
MDSKGSSQKGSRLLLLLVVSNLLLPQGVLASAWSHPQFEKGGGSGGGGSGGSAWSHPQFEKHHHHHHHHLEVLFQGPGSGSQCVNLTTRTQLPPAYTNSFTRGVYYPDKVFRSSVLHSTQDLFLPFFSNVTWFHAIHVSGTNGTKRFDNPVLPFNDGVYFASTEKSNIIRGWIFGTTLDSKTQSLLIVNNATNVVIKVCEFQFCNDPFLGVYYHKNNKSWMESEFRVYSSANNCTFEYVSQPFLMDLEGKQGNFKNLREFVFKNIDGYFKIYSKHTPINLVRDLPQGFSALEPLVDLPIGINITRFQTLLALHRSYLTPGDSSSGWTAGAAAYYVGYLQPRTFLLKYNENGTITDAVDCALDPLSETKCTLKSFTLPSTGG

SEQ ID NO: 90 - protein, 284 aa, Artificial Sequence
  Description of Artificial Sequence: Synthetic polypeptide
MGWSCIILFLVATATGVHAVECDFSPLLSGTPPQVYNFKRLVFTNCNYNLTKLLSLFSVNDFTCSQISPAAIASNCYSSLILDYFSYPLSMKSDLSVSSAGPISQFNYKQSFSNPTCLILATVPHNLTTITKPLKYSYINKCSRLLSDDRTEVPQLVNANQYSPCVSIVPSTVWEDGDYYRKQLSPLEGGGWLVASGSTVAMTEQLQMGFGITVQYGTDTNSVCPKLEGSGLPETGGLEVLFQGPGSHHHHHHSAWSHPQFEKGGGSGGGGSGGSAWSHPQFEK

SEQ ID NO: 91 - protein, 298 aa, Artificial Sequence
  Description of Artificial Sequence: Synthetic polypeptide
MGWSCIILFLVATATGVHARVQPTISIVRFPNITNLCPFGEVFNASKFASVYAWNRKRISNCVADYSVLYNSTSFSTFKCYGVSPTKLNDLCFTNVYADSFVVKGDEVRQIAPGQTGVIADYNYKLPDDFTGCVIAWNSVKQDALTGGNYGYLYRLFRKSKLKPFERDISTEIYQAGSTPCNGQVGLNCYYPLERYGFHPTTGVNYQPFRVVVLSFELLNGPATVCGPKLSTTLVKDKCVNFGSGLPETGGLEVLFQGPGSHHHHHHSAWSHPQFEKGGGSGGGGSGGSAWSHPQFEK

SEQ ID NO: 92 - protein, 297 aa, Artificial Sequence
  Description of Artificial Sequence: Synthetic polypeptide
MGWSCIILFLVATATGVHARVAPSKEVVRFPNITNLCPFGEVFNATTFPSVYAWERKRISNCVADYSVLYNSTSFSTFKCYGVSATKLNDLCFSNVYADSFVVKGDDVRQIAPGQTGVIADYNYKLPDDFLGCVLAWNTNSKDSSTSGNYNYLYRWVRRSKLNPYERDLSNDIYSPGGQSCSAVGPNCYNPLRPYGFFTTAGVGHQPYRVVVLSFELLNAPATVCGPKLSTDLIKNQCVNFGSGLPETGGLEVLFQGPGSHHHHHHSAWSHPQFEKGGGSGGGGSGGSAWSHPQFEK

SEQ ID NO: 93 - protein, 297 aa, Artificial Sequence
  Description of Artificial Sequence: Synthetic polypeptide
MGWSCIILFLVATATGVHARVVPSRDVVRFPNITNLCPFGEVFNATKFPSVYAWERKRISNCVADYSVLYNSTFFSTFKCYGVSATKLNDLCFSNVYADSFVVKGDDVRQIAPGQTGVIADYNYKLPDDFMGCVLAWNTRNIDATSTGNYNYKYRYLRHGKLRPFERDISNVPFSPDGKPCTPPALNCYWPLNDYGFYTTTGIGYQPYRVVVLSFELLNAPATVCGPKLSTDLIKNQCVNFGSGLPETGGLEVLFQGPGSHHHHHHSAWSHPQFEKGGGSGGGGSGGSAWSHPQFEK

SEQ ID NO: 94 - protein, 284 aa, Artificial Sequence
  Description of Artificial Sequence: Synthetic polypeptide
MGWSCIILFLVATATGVHAHHHHHHSAWSHPQFEKGGGSGGGGSGGSAWSHPQFEKGSLEVLFQGPVECDFSPLLSGTPPQVYNFKRLVFTNCNYNLTKLLSLFSVNDFTCSQISPAAIASNCYSSLILDYFSYPLSMKSDLSVSSAGPISQFNYKQSFSNPTCLILATVPHNLTTITKPLKYSYINKCSRLLSDDRTEVPQLVNANQYSPCVSIVPSTVWEDGDYYRKQLSPLEGGGWLVASGSTVAMTEQLQMGFGITVQYGTDTNSVCPKLEGSGLPETGG

SEQ ID NO: 95 - protein, 1294 aa, Artificial Sequence
  Description of Artificial Sequence: Synthetic polypeptide
MFVFLVLLPLVSSQCVNLTTRTQLPPAYTNSFTRGVYYPDKVFRSSVLHSTQDLFLPFFSNVTWFHAIHVSGTNGTKRFANPVLPFNDGVYFASTEKSNIIRGWIFGTTLDSKTQSLLIVNNATNVVIKVCEFQFCNDPFLGVYYHKNNKSWMESEFRVYSSANNCTFEYVSQPFLMDLEGKQGNFKNLREFVFKNIDGYFKIYSKHTPINLVRGLPQGFSALEPLVDLPIGINITRFQTLHALHRSYLTPGDSSSGWTAGAAAYYVGYLQPRTFLLKYNENGTITDAVDCALDPLSETKCTLKSFTVEKGIYQTSNFRVQPTESIVRFPNITNLCPFGEVFNATRFASVYAWNRKRISNCVADYSVLYNSASFSTFKCYGVSPTKLNDLCFTNVYADSFVIRGDEVRQIAPGQTGNIADYNYKLPDDFTGCVIAWNSNNLDSKVGGNYNYLYRLFRKSNLKPFERDISTEIYQAGSTPCNGVKGFNCYFPLQSYGFQPTYGVGYQPYRVVVLSFELLHAPATVCGPKKSTNLVKNKCVNFNFNGLTGTGVLTESNKKFLPFQQFGRDIADTTDAVRDPQTLEILDITPCSFGGVSVITPGTNTSNQVAVLYQGVNCTEVPVAIHADQLTPTWRVYSTGSNVFQTRAGCLIGAEHVNNSYECDIPIGAGICASYQTQTNSPGSASSVASQSIIAYTMSLGVENSVAYSNNSIAIPTNFTISVTTEILPVSMTKTSVDCTMYICGDSTECSNLLLQYGSFCTQLNRALTGIAVEQDKNTQEVFAQVKQIYKTPPIKDFGGFNFSQILPDPSKPSKRSPIEDLLFNKVTLADAGFIKQYGDCLGDIAARDLICAQKFNGLTVLPPLLTDEMIAQYTSALLAGTITSGWTFGAGPALQIPFPMQMAYRFNGIGVTQNVLYENQKLIANQFNSAIGKIQDSLSSTPSALGKLQDVVNQNAQALNTLVKQLSSNFGAISSVLNDILSRLDPPEAEVQIDRLITGRLQSLQTYVTQQLIRAAEIRASANLAATKMSECVLGQSKRVDFCGKGYHLMSFPQSAPHGVVFLHVTYVPAQEKNFTTAPAICHDGKAHFPREGVFVSNGTHWFVTQRNFYEPQIITTDNTFVSGNCDVVIGIVNNTVYDPLQPELDSFKEELDKYFKNHTSPDVDLGDISGINASVVNIQKEIDRLNEVAKNLNESLIDLQELGKYEQGSGYIPEAPRDGQAYVRKDGEWVLLSTFLGRSLPETGGLEVLFQGPGHHHHHHHHSAWSHPQFEKGGGSGGGGSGGSAWSHPQFEK

SEQ ID NO: 96 - protein, 1291 aa, Artificial Sequence
  Description of Artificial Sequence: Synthetic polypeptide
MFVFLVLLPLVSSQCVNLTTRTQLPPAYTNSFTRGVYYPDKVFRSSVLHSTQDLFLPFFSNVTWFHAIHVSGTNGTKRFANPVLPFNDGVYFASTEKSNIIRGWIFGTTLDSKTQSLLIVNNATNVVIKVCEFQFCNDPFLGVYYHKNNKSWMESEFRVYSSANNCTFEYVSQPFLMDLEGKQGNFKNLREFVFKNIDGYFKIYSKHTPINLVRGLPQGFSALEPLVDLPIGINITRFQTLHRSYLTPGDSSSGWTAGAAAYYVGYLQPRTFLLKYNENGTITDAVDCALDPLSETKCTLKSFTVEKGIYQTSNFRVQPTESIVRFPNITNLCPFGEVFNATRFASVYAWNRKRISNCVADYSVLYNSASFSTFKCYGVSPTKLNDLCFTNVYADSFVIRGDEVRQIAPGQTGNIADYNYKLPDDFTGCVIAWNSNNLDSKVGGNYNYLYRLFRKSNLKPFERDISTEIYQAGSTPCNGVKGFNCYFPLQSYGFQPTYGVGYQPYRVVVLSFELLHAPATVCGPKKSTNLVKNKCVNFNFNGLTGTGVLTESNKKFLPFQQFGRDIADTTDAVRDPQTLEILDITPCSFGGVSVITPGTNTSNQVAVLYQGVNCTEVPVAIHADQLTPTWRVYSTGSNVFQTRAGCLIGAEHVNNSYECDIPIGAGICASYQTQTNSPGSASSVASQSIIAYTMSLGVENSVAYSNNSIAIPTNFTISVTTEILPVSMTKTSVDCTMYICGDSTECSNLLLQYGSFCTQLNRALTGIAVEQDKNTQEVFAQVKQIYKTPPIKDFGGFNFSQILPDPSKPSKRSPIEDLLFNKVTLADAGFIKQYGDCLGDIAARDLICAQKFNGLTVLPPLLTDEMIAQYTSALLAGTITSGWTFGAGPALQIPFPMQMAYRFNGIGVTQNVLYENQKLIANQFNSAIGKIQDSLSSTPSALGKLQDVVNQNAQALNTLVKQLSSNFGAISSVLNDILSRLDPPEAEVQIDRLITGRLQSLQTYVTQQLIRAAEIRASANLAATKMSECVLGQSKRVDFCGKGYHLMSFPQSAPHGVVFLHVTYVPAQEKNFTTAPAICHDGKAHFPREGVFVSNGTHWFVTQRNFYEPQIITTDNTFVSGNCDVVIGIVNNTVYDPLQPELDSFKEELDKYFKNHTSPDVDLGDISGINASVVNIQKEIDRLNEVAKNLNESLIDLQELGKYEQGSGYIPEAPRDGQAYVRKDGEWVLLSTFLGRSLPETGGLEVLFQGPGHHHHHHHHSAWSHPQFEKGGGSGGGGSGGSAWSHPQFEK

SEQ ID NO: 97 - protein, 398 aa, Severe acute respiratory syndrome coronavirus 2
  MOD_RES (226)..(226): Any amino acid
RVQPTESIVRFPNITNLCPFGEVFNATRFASVYAWNRKRISNCVADYSVLYNSASFSTFKCYGVSPTKLNDLCFTNVYADSFVIRGDEVRQIAPGQTGKIADYNYKLPDDFTGCVIAWNSNNLDSKVGGNYNYLYRLFRKSNLKPFERDISTEIYQAGSTPCNGVEGFNCYFPLQSYGFQPTNGVGYQPYRVVVLSFELLHAPATVCGPKKSTNLVKNKCVNFLPXTGGGGGGSGDIIKLLNEQVNKEMNSSNLYMSMSSWCYTHSLDGAGLFLFDHAAEEYEHAKKLIIFLNENNVPVQLTSISAPEHKFEGLTQIFQKAYEHEQHISESINNIVDHAIKSKDHATFNFLQWYVAEQHEEEVLFKDILDKIELIGNENHGLYLADQYVKGIAKSRKS

SEQ ID NO: 98 - protein, 406 aa, Artificial Sequence
  Description of Artificial Sequence: Synthetic polypeptide
MGWSCIILFLVATATGVHAVECDFSPLLSGTPPQVYNFKRLVFTNCNYNLTKLLSLFSVNDFTCSQISPAAIASNCYSSLILDYFSYPLSMKSDLSVSSAGPISQFNYKQSFSNPTCLILATVPHNLTTITKPLKYSYINKCSRLLSDDRTEVPQLVNANQYSPCVSIVPSTVWEDGDYYRKQLSPLEGGGWLVASGSTVAMTEQLQMGFGITVQYGTDTNSVCPKLEGSGLPETGGGGGGSGDIIKLLNEQVNKEMNSSNLYMSMSSWCYTHSLDGAGLFLFDHAAEEYEHAKKLIIFLNENNVPVQLTSISAPEHKFEGLTQIFQKAYEHEQHISESINNIVDHAIKSKDHATFNFLQWYVAEQHEEEVLFKDILDKIELIGNENHGLYLADQYVKGIAKSRKS

SEQ ID NO: 99 - protein, 420 aa, Artificial Sequence
  Description of Artificial Sequence: Synthetic polypeptide
MGWSCIILFLVATATGVHARVQPTISIVRFPNITNLCPFGEVFNASKFASVYAWNRKRISNCVADYSVLYNSTSFSTFKCYGVSPTKLNDLCFTNVYADSFVVKGDEVRQIAPGQTGVIADYNYKLPDDFTGCVIAWNSVKQDALTGGNYGYLYRLFRKSKLKPFERDISTEIYQAGSTPCNGQVGLNCYYPLERYGFHPTTGVNYQPFRVVVLSFELLNGPATVCGPKLSTTLVKDKCVNFGSGLPETGGGGGGSGDIIKLLNEQVNKEMNSSNLYMSMSSWCYTHSLDGAGLFLFDHAAEEYEHAKKLIIFLNENNVPVQLTSISAPEHKFEGLTQIFQKAYEHEQHISESINNIVDHAIKSKDHATFNFLQWYVAEQHEEEVLFKDILDKIELIGNENHGLYLADQYVKGIAKSRKS

SEQ ID NO: 100 - protein, 419 aa, Artificial Sequence
  Description of Artificial Sequence: Synthetic polypeptide
MGWSCIILFLVATATGVHARVAPSKEVVRFPNITNLCPFGEVFNATTFPSVYAWERKRISNCVADYSVLYNSTSFSTFKCYGVSATKLNDLCFSNVYADSFVVKGDDVRQIAPGQTGVIADYNYKLPDDFLGCVLAWNTNSKDSSTSGNYNYLYRWVRRSKLNPYERDLSNDIYSPGGQSCSAVGPNCYNPLRPYGFFTTAGVGHQPYRVVVLSFELLNAPATVCGPKLSTDLIKNQCVNFGSGLPETGGGGGGSGDIIKLLNEQVNKEMNSSNLYMSMSSWCYTHSLDGAGLFLFDHAAEEYEHAKKLIIFLNENNVPVQLTSISAPEHKFEGLTQIFQKAYEHEQHISESINNIVDHAIKSKDHATFNFLQWYVAEQHEEEVLFKDILDKIELIGNENHGLYLADQYVKGIAKSRKS

SEQ ID NO: 101 - protein, 419 aa, Artificial Sequence
  Description of Artificial Sequence: Synthetic polypeptide
MGWSCIILFLVATATGVHARVVPSRDVVRFPNITNLCPFGEVFNATKFPSVYAWERKRISNCVADYSVLYNSTFFSTFKCYGVSATKLNDLCFSNVYADSFVVKGDDVRQIAPGQTGVIADYNYKLPDDFMGCVLAWNTRNIDATSTGNYNYKYRYLRHGKLRPFERDISNVPFSPDGKPCTPPALNCYWPLNDYGFYTTTGIGYQPYRVVVLSFELLNAPATVCGPKLSTDLIKNQCVNFGSGLPETGGGGGGSGDIIKLLNEQVNKEMNSSNLYMSMSSWCYTHSLDGAGLFLFDHAAEEYEHAKKLIIFLNENNVPVQLTSISAPEHKFEGLTQIFQKAYEHEQHISESINNIVDHAIKSKDHATFNFLQWYVAEQHEEEVLFKDILDKIELIGNENHGLYLADQYVKGIAKSRKS

SEQ ID NO: 102 - protein, 350 aa, Artificial Sequence
  Description of Artificial Sequence: Synthetic polypeptide
MGWSCIILFLVATATGVHASFFAHTTVNITIDLGMKRSGYGQPIASPLSNITLPMQDNNTDVYCIRSNQFSIYVHSTCKSSLWDNVFNQDCTDVLEATAVIKTGTCPFSFDKLNNHLTFNKFCLSLSPVGANCKFDVAARTRTNEQVVRSLYVIYEEGDNIVGVPSDNSGLHDLSLPETGGGGGGSGDIIKLLNEQVNKEMNSSNLYMSMSSWCYTHSLDGAGLFLFDHAAEEYEHAKKLIIFLNENNVPVQLTSISAPEHKFEGLTQIFQKAYEHEQHISESINNIVDHAIKSKDHATFNFLQWYVAEQHEEEVLFKDILDKIELIGNENHGLYLADQYVKGIAKSRKS

SEQ ID NO: 103 - protein, 1518 aa, Artificial Sequence
  Description of Artificial Sequence: Synthetic polypeptide
MKLLFVVLVVLPSIYGDNFPCSKFLNRTIGNHWNLIENFLLNYSIRLPPNSDVVLGDYFPTVQPWFNCIRNNNNSLYVTMENLKALYWDYATENITSDHRQRLHVVVKGKPYSITVTTTRNFDAAEGAIICICKGSPPTTTTGNLDCNWGSDCRLNHKFPICPSNSQANCGNMLYGLQWFTDEVVAYLHGAIYRISFENKWFGTVTLGDMRATTLQTAGALVDLWWFNPVYDVTYYRVNNKNGTTIVSNCTDQCASYVDNVFTTQPGGLIPSDFSFNNWFLLTNSSTVVSGKLVTRQPLVVNCLWPVPSFKEAASTFCFEGAGFDQCNGAVLNNTVDVIRFNLNFTADVQSGMGATVFSLNTTGGVILEISCYNDIVSESSFYSYGDIPFGITDGPRYCYVLYNGTTLKYLGTLPPSVKEIAISKWGHFYINGYNFFSTFPIDCISFNLTTGASGAFWTIAYTSYTEALVQVENTAIKKVTYCNSHINNIKCSQLTANLQNGFYPVASSEVGLVNKSVVLLPSFFAHTTVNITIDLGMKRSGYGQPIASPLSNITLPMQDNNTDVYCIRSNQFSIYVHSTCKSSLWDNVFNQDCTDVLEATAVIKTGTCPFSFDKLNNHLTFNKFCLSLSPVGANCKFDVAARTRTNEQVVRSLYVIYEEGDNIVGVPSDNSGLHDLSVLHLDSCTDYNIYGRTGVGVIRQTNSTLLSGLYYTSLSGDLLGFKNVSDGVIYSVTPCDVSAQAAVIDGAIVGAMTSINSELLGLTHWTTTPNFYYYSIYNYTNERTRGTAIDSNDVDCEPIITYSNIGVCKNGALVFINVTHSDGDVQPISTGNVTIPTNFTISVQVEYIQVYTTPVSIDCARYVCNGNPRCNKLLTQYVSACQTIEQALAMGARLENMEVDSMLFVSENALKLASVEAFNSTENLDPIYKEWPNIGGSWLGGLKDILPSHNSKRKYRSAIEDLLFDKVVTSGLGTVDEDYKRCTGGYDIADLVCAQYYNGIMVLPGVANDDKMTMYTASLAGGITLGALGGGAVAIPFAVAVQARLNYVALQTDVLNKNQQILANAFNQAIGNITQAFGKVNDAIHQTSKGLATVAKVLAKVQDVVNTQGQALSHLTVQLQNNFQAISSSISDIYNRLDPPSADAQVDRLITGRLTALNAFVSQTLTRQAEVRASRQLAKDKVNECVRSQSQRFGFCGNGTHLFSLANAAPNGMIFFHTVLLPTAYQTVTACSGICASDGDRTFGLVVKDVQLTLFRNLDDKFYLTPRTMYQPRAATSSDFVQIEGCDVLFVNATEIDLPSIIPDYIDINQGSGYIPEAPRDGQAYVRKDGEWVLLSTFLGRSLPETGGGGGGSGDIIKLLNEQVNKEMNSSNLYMSMSSWCYTHSLDGAGLFLFDHAAEEYEHAKKLIIFLNENNVPVQLTSISAPEHKFEGLTQIFQKAYEHEQHISESINNIVDHAIKSKDHATFNFLQWYVAEQHEEEVLFKDILDKIELIGNENHGLYLADQYVKGIAKSRKS

SEQ ID NO: 104 - protein, 1518 aa, Artificial Sequence
  Description of Artificial Sequence: Synthetic polypeptide
MKLLFVVLVVLPSIYGDNFPCSKFLNRTIGNHWNLIENFLLNYSIRLPPNSDVVLGDYFPTVQPWFNCIRNNNNSLYVTMENLKALYWDYATENITSDHRQRLHVVVKGKPYSITVTTTRNFDAAEGAIICICKGSPPTTTTGNLDCNWGSDCRLNHKFPICPSNSQANCGNMLYGLQWFTDEVVAYLHGAIYRISFENKWFGTVTLGDMRATTLQTAGALVDLWWFNPVYDVTYYRVNNKNGTTIVSNCTDQCASYVDNVFTTQPGGLIPSDFSFNNWFLLTNSSTVVSGKLVTRQPLVVNCLWPVPSFKEAASTFCFEGAGFDQCNGAVLNNTVDVIRFNLNFTADVQSGMGATVFSLNTTGGVILEISCYNDIVSESSFYSYGDIPFGITDGPRYCYVLYNGTTLKYLGTLPPSVKEIAISKWGHFYINGYNFFSTFPIDCISFNLTTGASGAFWTIAYTSYTEALVQVENTAIKKVTYCNSHINNIKCSQLTANLQNGFYPVASSEVGLVNKSVVLLPSFFAHTTVNITIDLGMKRSGYGQPIASPLSNITLPMQDNNTDVYCIRSNQFSIYVHSTCKSSLWDNVFNQDCTDVLEATAVIKTGTCPFSFDKLNNHLTFNKFCLSLSPVGANCKFDVAARTRTNEQVVRSLYVIYEEGDNIVGVPSDNSGLHDLSVLHLDSCTDYNIYGRTGVGVIRQTNSTLLSGLYYTSLSGDLLGFKNVSDGVIYSVTPCDVSAQAAVIDGAIVGAMTSINSELLGLTHWTTTPNFYYYSIYNYTNERTRGTAIDSNDVDCEPIITYSNIGVCKNGALVFINVTHSDGDVQPISTGNVTIPTNFTISVQVEYIQVYTTPVSIDCARYVCNGNPRCNKLLTQYVSACQTIEQALAMGARLENMEVDSMLFVSENALKLASVEAFNSTENLDPIYKEWPNIGGSWLGGLKDILPSHNSKRKYRSPIEDLLFDKVVTSGLGTVDEDYKRCTGGYDIADLVCAQYYNGIMVLPGVANDDKMTMYTASLAGGITLGAPGGGAVAIPFPVAVQARLNYVALQTDVLNKNQQILANAFNQAIGNITQPFGKVNDAIHQTSKGLATVAKVLAKVQDVVNTQGQALSHLTVQLQNNFQAISSSISDIYNRLDPPSADAQVDRLITGRLTALNAFVSQTLTRQAEVRASRQLAKDKVNECVRSQSQRFGFCGNGTHLFSLANAAPNGMIFFHTVLLPTAYQTVTACSGICASDGDRTFGLVVKDVQLTLFRNLDDKFYLTPRTMYQPRAATSSDFVQIEGCDVLFVNATEIDLPSIIPDYIDINQGSGYIPEAPRDGQAYVRKDGEWVLLSTFLGRSLPETGGGGGGSGDIIKLLNEQVNKEMNSSNLYMSMSSWCYTHSLDGAGLFLFDHAAEEYEHAKKLIIFLNENNVPVQLTSISAPEHKFEGLTQIFQKAYEHEQHISESINNIVDHAIKSKDHATFNFLQWYVAEQHEEEVLFKDILDKIELIGNENHGLYLADQYVKGIAKSRKS

SEQ ID NO: 105 - protein, 350 aa, Artificial Sequence
  Description of Artificial Sequence: Synthetic polypeptide
MGWSCIILFLVATATGVHAKLPELEVVQLNISAHMDFGEARLDSVTINGNTSYCATKPYFRLETNFMCTGCTMNLRTDTCSFDLSAVNNGMSFSQFCLSTESGACEMKIIVTYVWNYLLRQRLYVTAVEGQTHTGTTSVHATDGSGYIPEAPRDGQAYVRKDGEWVLLSTFLGRSLPETGGGGGGSGDIIKLLNEQVNKEMNSSNLYMSMSSWCYTHSLDGAGLFLFDHAAEEYEHAKKLIIFLNENNVPVQLTSISAPEHKFEGLTQIFQKAYEHEQHISESINNIVDHAIKSKDHATFNFLQWYVAEQHEEEVLFKDILDKIELIGNENHGLYLADQYVKGIAKSRKS

SEQ ID NO: 106 - protein, 1227 aa, Artificial Sequence
  Description of Artificial Sequence: Synthetic polypeptide
MQRALLIMTLLCLVRAKFADDLLDLLTFPGAHRFLHKLTSNSSSFYSRANNFDVGVLPGYPTENVNLFSPLTNSTLPINGLHRSYQPLMLNCLTKITNHTLSMYLLPSEIQTYSCGGAMVKYQTHDAVRIILDLTVTDHISVEVVGQRGENYVFVCSEQFNYTTALHNSTFFSLNSELYCFTNNTYLGILPPDLTDFTVYRTGQFYANGYLLGTLPITVNYVRLYRGHLSANSAHFALANLTDTLITLTNTTISQITYCDKSVVDSIACQRSSHEVEDGFYSDPKSAVRARQRTIVTLPKLPELEVVQLNISAHMDFGEARLDSVTINGNTSYCATKPYFRLETNFMCTGCTMNLRTDTCSFDLSAVNNGMSFSQFCLSTESGACEMKIIVTYVWNYLLRQRLYVTAVEGQTHTGTTSVHATDTSSVITDVCTDYTIYGVSGTGIIKPSDLLLHNGIAFTSPTGELYAFKNITTGKTLQVLPCETPSQLIVINNTVVGAITSSNSTENNRFTTTIVTPTFFYSTNATTFNCTKPVLSYGPISVCSDGAIAGTSTLQNTRPSIVSLYDGEVEIPSAFSLSVQTEYLQVQAEQVIVDCPQYVCNGNSRCLQLLAQYTSACSNIEAALHSSAQLDSREIINMFQTSTQSLQLANITNFKGDYNFSSILTTRLGGRSPIEDLLFNKVVTSGLGTVDQDYKACSRDMAIADLVCSQYYNGIMVLPGVVDAEKMAMYTGSLTGAMVFGGPTAAAAIPFPTAVQARLNYVALQTNVLQENQKILAESFNQAVGNISLPLSSVNDAIQQTSEALNTVAIAIKKIQTVVNQQGEALSHLTAQLSNNFQAISTSIQDIYNRLEPPEANQQVDRLITGRLAALNAYVTQLLNQMSQIRQSRLLAQQKINECVKSQSSRYGFCGNGTHIFSLTQTAPNGIFFMHAVLVPNKFTRVNASAGICVDNIKGYSLQPQLILYQFNNSWRVTPRNMYEPRLPRQADFIQLTDCSVTFYNTTAANLPNIIPDIIDVNQGSGYIPEAPRDGQAYVRKDGEWVLLSTFLGRSLPETGGGGGGSGDIIKLLNEQVNKEMNSSNLYMSMSSWCYTHSLDGAGLFLFDHAAEEYEHAKKLIIFLNENNVPVQLTSISAPEHKFEGLTQIFQKAYEHEQHISESINNIVDHAIKSKDHATFNFLQWYVAEQHEEEVLFKDILDKIELIGNENHGLYLADQYVKGIAKSRKS

SEQ ID NO: 107 - protein, 350 aa, Artificial Sequence
  Description of Artificial Sequence: Synthetic polypeptide
MGWSCIILFLVATATGVHAKLPELEVVQLNISAHMDFGEARLDSVTINGNTSYCVTKPYFRLETNFMCTGCTMNLRTDTCSFDLSAVNNGMSFSQFCLSTESGACEMKIIVTYVWNYLLRQRLYVTAVEGQTHTGTTSVHATDGSGYIPEAPRDGQAYVRKDGEWVLLSTFLGRSLPETGGGGGGSGDIIKLLNEQVNKEMNSSNLYMSMSSWCYTHSLDGAGLFLFDHAAEEYEHAKKLIIFLNENNVPVQLTSISAPEHKFEGLTQIFQKAYEHEQHISESINNIVDHAIKSKDHATFNFLQWYVAEQHEEEVLFKDILDKIELIGNENHGLYLADQYVKGIAKSRKS

SEQ ID NO: 108 - protein, 1228 aa, Artificial Sequence
  Description of Artificial Sequence: Synthetic polypeptide
MQRALLIMTLLCLVRAKFADDLLDLLTFPGAHRFLHKLTRNSSSLYSRANNNFDVGVLPGYPTKNVNLFSPLTNSTLPINGLHRSYQPLMLNCLTKITNHTLSMYLLPSEIQTYSCGGAMVKYQTHDAVRIILDLTTTDHISVEVVGQHGENYVFVCSEQFNYTTALHNSTFFSLNSELYCFTNNTYLGILPPDLTDFTVYRTGQFYANGYLLGTLPITVNYVRLYRGHLSANSAHFALANLTDTLITLTNTTISQITYCDKSVVDSIACQRSSHEVEDGFYSDPKSAVRARQRTIVTLPKLPELEVVQLNISAHMDFGEARLDSVTINGNTSYCVTKPYFRLETNFMCTGCTMNLRTDTCSFDLSAVNNGMSFSQFCLSTESGACEMKIIVTYVWNYLLRQRLYVTAVEGQTHTGTTSVHATDTSSVITDVCTDYTIYGVSGTGIIKPSDLLLHNGIAFTSPTGELYAFKNITTGKTLQVLPCETPSQLIVINNTVVGAITSSNSTENNRFTTTIVTPTFFYSTNATTFNCTKPVLSYGPISVCSDGAIAGTSTLQNTRPSIVSLYDGEVEIPSAFSLSVQTEYLQVQAEQVIVDCPQYVCNGNSRCLQLLAQYTSACSNIEAALHSSAQLDSREIINMFQTSTQSLQLANITNFKGDYNFSSILTTRIGGRSPIEDLLFNKVVTSGLGTVDQDYKSCSRDMAIADLVCSQYYNGIMVLPGVVDAEKMAMYTGSLTGAMVFGGPTAAAAIPFPTAVQARLNYVALQTNVLQENQKILAESFNQAVGNISLPLSSVNDAIQQTSEALNTVAIAIKKIQTVVNQQGEALSHLTAQLSNNFQAISTSIQDIYNRLEPPEANQQVDRLITGRLAALNAYVTQLLNQMSQIRQSRLLAQQKINECVKSQSSRYGFCGNGTHIFSLTQTAPNGIFFMHAVLVPNKFTRVNASAGICVDNTRGYSLQPQLILYQFNNSWRVTPRNMYEPRLPRQADFIQLTDCSVTFYNTTAANLPNIIPDIIDVNQGSGYIPEAPRDGQAYVRKDGEWVLLSTFLGRSLPETGGGGGGSGDIIKLLNEQVNKEMNSSNLYMSMSSWCYTHSLDGAGLFLFDHAAEEYEHAKKLIIFLNENNVPVQLTSISAPEHKFEGLTQIFQKAYEHEQHISESINNIVDHAIKSKDHATFNFLQWYVAEQHEEEVLFKDILDKIELIGNENHGLYLADQYVKGIAKSRKS

SEQ ID NO: 109 - protein, 394 aa, Artificial Sequence
  Description of Artificial Sequence: Synthetic polypeptide
MGWSCIILFLVATATGVHATNLCPFDEVFNATRFASVYAWNRKRISNCVADYSVLYNLAPFFTFKCYGVSPTKLNDLCFTNVYADSFVIRGDEVRQIAPGQTGNIADYNYKLPDDFTGCVIAWNSNKLDSKVSGNYNYLYRLFRKSNLKPFERDISTEIYQAGNKPCNGVAGFNCYFPLRSYSFRPTYGVGHQPYRVVVLSFELLHAPATVCGPKKGSGLPETGGGGGGSGDIIKLLNEQVNKEMNSSNLYMSMSSWCYTHSLDGAGLFLFDHAAEEYEHAKKLIIFLNENNVPVQLTSISAPEHKFEGLTQIFQKAYEHEQHISESINNIVDHAIKSKDHATFNFLQWYVAEQHEEEVLFKDILDKIELIGNENHGLYLADQYVKGIAKSRKS

SEQ ID NO: 110 - protein, 392 aa, Artificial Sequence
  Description of Artificial Sequence: Synthetic polypeptide
MGWSCIILFLVATATGVHATNLCPFDEVFNATRFASVYAWNRKRISNCVADYSVLYNLAPFFTFKCYGVSPTKLNDLCFTNVYADSFVIRGDEVRQIAPGQTGNIADYNYKLPDDFTGCVIAWNSNKLDSKVSGNYNYLYRLFRKSNLKPFERDISTEIYQAGNKPCNGVAGFNCYFPLRSYSFRPTYGVGHQPYRVVVLSFELLHAPATVCGPGSGLPETGGGGGGSGDIIKLLNEQVNKEMNSSNLYMSMSSWCYTHSLDGAGLFLFDHAAEEYEHAKKLIIFLNENNVPVQLTSISAPEHKFEGLTQIFQKAYEHEQHISESINNIVDHAIKSKDHATFNFLQWYVAEQHEEEVLFKDILDKIELIGNENHGLYLADQYVKGIAKSRKS

SEQ ID NO: 111 - protein, 7 aa, Artificial Sequence
  Description of Artificial Sequence: Synthetic peptide
  MOD_RES (3)..(3): Any amino acid
  MOD_RES (6)..(7): Any amino acid
LPXTGXX

SEQ ID NO: 112 - protein, 8 aa, Artificial Sequence
  Description of Artificial Sequence: Synthetic peptide
  MOD_RES (6)..(8): Any amino acid
GGGGGXXX

SEQ ID NO: 113 - protein, 12 aa, Artificial Sequence
  Description of Artificial Sequence: Synthetic peptide
  MOD_RES (3)..(3): Any amino acid
  MOD_RES (10)..(12): Any amino acid
LPXTGGGGGXXX

SEQ ID NO: 114 - protein, 10 aa, Artificial Sequence
  Description of Artificial Sequence: Synthetic peptide
  MOD_RES (1)..(3): Any amino acid
  MOD_RES (6)..(6): Any amino acid
  MOD_RES (9)..(10): Any amino acid
XXXLPXTGXX

SEQ ID NO: 115 - protein, 5 aa, Artificial Sequence
  Description of Artificial Sequence: Synthetic peptide
GGGGG

SEQ ID NO: 116 - protein, 12 aa, Artificial Sequence
  Description of Artificial Sequence: Synthetic peptide
  MOD_RES (1)..(3): Any amino acid
  MOD_RES (6)..(6): Any amino acid
XXXLPXTGGGGG

SEQ ID NO: 117 - DNA, 3816 bp, Artificial Sequence
  Description of Artificial Sequence: Synthetic polynucleotide
atgtttatctttctgctgtttctgaccctgaccagcggcagcgacctggatagatgcaccaccttcgacgatgtgcaggcccctaactacacccagcacaccagctctatgcggggcgtgtactaccccgacgagatcttcagaagcgacaccctgtatctgacccaggacctgttcctgcctttctacagcaacgtgaccggcttccacaccatcaaccacaccttcgataaccctgtgatccccttcaaggacggcatctactttgccgccaccgagaagtccaacgtcgtcagaggatgggtgttcggcagcaccatgaacaacaagagccagagcgtgatcatcatcaacaacagcaccaacgtggtcatccgggcctgcaacttcgagctgtgcgacaacccattcttcgccgtgtccaagcctatgggcacccagacacacaccatgatcttcgacaacgccttcaactgcaccttcgagtacatcagcgacgccttcagcctggacgtgtccgagaaaagcggcaacttcaagcacctgagggaattcgtgttcaagaacaaggatggcttcctgtacgtgtacaagggctaccagcctatcgacgtcgtgcgggatctgcccagcggcttcaataccctgaagcctatcttcaagctgcccctgggcatcaacatcaccaacttcagagccatcctgaccgctttcagccccgctcaggatacctggggaacatctgccgccgcttacttcgtgggctacctgaagccaaccaccttcatgctgaagtacgacgagaacggcaccatcaccgacgccgtggactgtagccaaaatcctctggccgagctgaagtgcagcgtgaagtccttcgagatcgacaagggcatctaccagaccagcaatttcagagtggtgccctccggggatgtcgtgcggttccccaatatcaccaatctgtgccccttcggcgaggtgttcaacgccacaaagttccccagcgtgtacgcctgggagagaaagaaaatcagcaactgcgtggccgactacagcgtgctgtacaactccaccttcttcagcaccttcaagtgctacggcgtgtccgccaccaagctgaacgatctgtgcttcagcaatgtgtacgccgacagcttcgtggtcaagggcgacgatgttcgccagattgcccctggacagacaggcgtgatcgccgattacaactacaagctgcctgacgacttcatgggctgcgtgctggcctggaacaccagaaacatcgatgccaccagcaccggcaactacaattacaagtacagatacctgcggcacggcaagctgcggcctttcgagagggatatctccaacgtgccattcagccctgacggcaagccttgcacacctcctgctctgaactgctactggcccctgaacgactacggcttttacaccaccacaggcatcggctatcagccctatagagtggtggtcctgtcctttgagctgctgaatgcccctgccacagtgtgcggacctaagctgtctaccgacctgatcaagaaccagtgcgtgaacttcaacttcaacggcctgaccggcaccggcgtgctgacaccaagcagcaagagattccagcctttccagcagttcggccgggatgtgtccgacttcacagattctgtgcgggaccccaagaccagcgagatcctggatatcagcccctgctctttcggcggagtgtccgtgatcacccctggcacaaatgcctctagcgaagtggccgtgctgtatcaggacgtgaactgcaccgatgtgtccaccgccattcacgccgatcagctgactcccgcttggcggatctatagcacaggcaacaacgtgttccagacacaagccggctgtctgatcggagccgagcatgtggataccagctacgagtgcgacatccctatcggcgctggcatctgtgcctcttaccacaccgtgtctctgctgcggagcaccagccagaaatccatcgtggcctacaccatgagcctgggcgccgattcttctatcgcctactccaacaacacaatcgctatccccaccaatttcagcatctccatcaccaccgaagtgatgcccgtgtccatggccaagacctccgtggattgcaacatgtacatctgcggcgacagcaccgagtgcgccaatctgctgctgcagtacggcagcttctgcacccagctgaatagagccctgtctggaattgccgccgagcaggacagaaacaccagagaagtgttcgcccaagtgaagcagatgtataagaccccgacactcaagtacttcggcgggttcaacttctcccagatcctgcctgatcctctgaagcccaccaagcggagcttcatcgaggacctgctgttcaacaaagtgaccctggccgacgccggctttatgaagcagtatggcgagtgcctgggcgacatcaacgccagggatctgatttgcgcccagaagtttaacggactgaccgtgctgcctcctctgctgaccgatgatatgatcgccgcctacacagccgctctggtgtctggtacagctaccgccggatggacatttggagctggtgccgctctgcagatcccctttgctatgcagatggcctaccggttcaacggcatcggagtgacccagaatgtgctgtacgagaatcagaagcagatcgccaatcagttcaacaaggccatcagccagatccaagagagcctgaccaccacaagcacagccctgggaaagctgcaggacgtggtcaaccagaatgctcaggccctgaacaccctggtcaagcagctgagcagcaacttcggcgccatcagctccgtgctgaacgacatcctgagcagactggaccctcctgaggccgaggtgcagatcgacagactgatcacaggcagactgcagagcctgcagacctacgtgacacagcagctgatcagagccgccgagattagagcctctgccaatctggccgccactaagatgagcgagtgtgtcctgggccagagcaagagagtggacttttgcggcaagggctatcacctgatgagcttcccacaggccgctcctcatggcgtggtctttctgcacgtgacatacgtgcccagccaagagcggaacttcacaacagccccagccatctgccacgagggcaaagcctactttcccagagaaggcgtgttcgtgtttaacggcacctcctggtttatcacccagcggaatttcttcagcccgcaaatcatcaccacagacaacaccttcgtgtccggcaactgtgacgtcgtgatcggcatcattaacaataccgtgtacgaccctctgcagcccgagctggacagcttcaaagaggaactggataagtacttcaagaatcacacaagccccgacgtggacctgggcgatatctctggaatcaacgcctccgtcgtgaacatccagaaagagatcgaccggctgaacgaggtggccaagaacctgaacgagtccctgatcgacctgcaagagctggggaagtacgagcaaggcagcggctatatccccgaggctcctagagatggccaggcctatgttcggaaggacggcgaatgggtgctgctgagcactttcctggggagaagcctggaagtgctgtttcaaggccctggccaccaccatcaccatcatcatcacagcgcttggagccatcctcagttcgagaaaggcggaggatctggcggaggtggaagcggtggatctgcttggtcacacccacagtttgagaagtgatga

SEQ ID NO: 118 - DNA, 3816 bp, Artificial Sequence
  Description of Artificial Sequence: Synthetic polynucleotide
atgtttatctttctgctgtttctgaccctgaccagcggcagcgacctggatagatgcaccaccttcgacgatgtgcaggcccctaactacacccagcacaccagctctatgcggggcgtgtactaccccgacgagatcttcagaagcgacaccctgtatctgacccaggacctgttcctgcctttctacagcaacgtgaccggcttccacaccatcaaccacaccttcgataaccctgtgatccccttcaaggacggcatctactttgccgccaccgagaagtccaacgtcgtcagaggatgggtgttcggcagcaccatgaacaacaagagccagagcgtgatcatcatcaacaacagcaccaacgtggtcatccgggcctgcaacttcgagctgtgcgacaacccattcttcgccgtgtccaagcctatgggcacccagacacacaccatgatcttcgacaacgccttcaactgcaccttcgagtacatcagcgacgccttcagcctggacgtgtccgagaaaagcggcaacttcaagcacctgagggaattcgtgttcaagaacaaggatggcttcctgtacgtgtacaagggctaccagcctatcgacgtcgtgcgggatctgcccagcggcttcaataccctgaagcctatcttcaagctgcccctgggcatcaacatcaccaacttccgggctatcctgaccgccttcctgcctgctcaagatacctggggaacaagcgccgctgcctacttcgtgggctacctgaagccaaccaccttcatgctgaagtacgacgagaacggcaccatcaccgacgccgtggactgtagccaaaatcctctggccgagctgaagtgcagcgtgaagtccttcgagatcgacaagggcatctaccagaccagcaacttcagagtggtgcccagcagagatgtcgtgcggttccccaatatcaccaatctgtgccccttcggcgaggtgttcaacgccacaaagttccccagcgtgtacgcctgggagagaaagcggatcagcaactgcgtggccgactacagcgtgctgtacaactccaccttcttcagcaccttcaagtgctacggcgtgtccgccaccaagctgaacgatctgtgcttcagcaatgtgtacgccgacagcttcgtggtcaagggcgacgatgttcgccagattgcccctggacagacaggcgtgatcgccgattacaactacaagctgcctgacgacttcatgggctgcgtgctggcctggaacaccagaaacatcgatgccaccagcaccggcaactacaattacaagtacagatacctgcggcacggcaagctgcggcctttcgagagggatatctccaacgtgccattcagccccgacggcaagccatgtacacctccagcactgaactgctactggcccctgaacgactacggcttttacaccaccacaggcatcggctatcagccctatagagtggtggtcctgtcctttgagctgctgaatgcccctgccacagtgtgcggacctaagctgtctaccgacctgatcaagaaccagtgcgtgaacttcaacttcaacggcctgaccggcaccggcgtgctgacaccaagcagcaagagattccagcctttccagcagttcggccgggatgtgtccgacttcacagattctgtgcgggaccccaagaccagcgagatcctggatatcagcccctgctctttcggcggagtgtccgtgatcacccctggcacaaatgccagctctgaagtggccgtgctgtatcaggacgtgaactgcaccgatgtgtccaccgccattcacgccgatcagctgactcccgcttggcggatctatagcacaggcaacaacgtgttccagacacaagccggctgtctgatcggagccgagcatgtggataccagctacgagtgcgacatccctatcggcgctggaatttgcgccagctaccacaccgtgtctctgctgagaagcaccagccagaaatccatcgtggcctacaccatgagcctgggcgccgattcttctatcgcctactccaacaacacaatcgctatccccaccaatttcagcatctccatcaccaccgaagtgatgcccgtgtccatggccaagacctccgtggattgcaacatgtacatctgcggcgacagcaccgagtgcgccaatctgctgctgcagtacggcagcttctgcacccagctgaatagagccctgtctggaattgccgccgagcaggacagaaacaccagagaagtgttcgcccaagtgaagcagatgtataagacccctacactcaaggacttcggcgggttcaacttctcccagatcctgcctgatcctctgaagcccaccaagcggagcttcatcgaggacctgctgttcaacaaagtgaccctggccgacgccggctttatgaagcagtatggcgagtgcctgggcgacatcaacgccagggatctgatttgcgcccagaagtttaacggactgaccgtgctgcctcctctgctgaccgatgatatgatcgccgcctacacagccgctctggtgtctggtacagctaccgccggatggacatttggagctggtgccgctctgcagatcccctttgctatgcagatggcctaccggttcaacggcatcggagtgacccagaatgtgctgtacgagaatcagaagcagatcgccaatcagttcaacaaggccatcagccagatccaagagagcctgaccaccacaagcacagccctgggaaagctgcaggacgtggtcaaccagaatgctcaggccctgaacaccctggtcaagcagctgagcagcaatttcggcgccatcagctccgtgctgaacgacatcctgagcagactggaccctcctgaggccgaggtgcagatcgacagactgatcacaggcagactgcagagcctgcagacctacgtgacacagcagctgatcagagccgccgagattagagcctctgccaatctggccgccactaagatgagcgagtgtgtcctgggccagagcaagagagtggacttttgcggcaagggctatcacctgatgagcttcccacaggccgctcctcatggcgtggtctttctgcacgtgacatacgtgcccagccaagagcggaacttcacaacagccccagccatctgccacgagggcaaagcctactttcccagagaaggcgtgttcgtgtttaacggcacctcctggtttatcacccagcggaatttcttcagcccgcaaatcatcaccacagacaacaccttcgtgtccggcaactgtgacgtcgtgatcggcatcattaacaataccgtgtacgaccctctgcagcccgagctggacagcttcaaagaggaactggacaagtacttcaagaatcacacaagccccgatgtggacctgggcgatatctccggcatcaatgccagcgtcgtgaacatccaagaggaaatcgaccggctgaacgaggtggccaagaacctgaacgagtccctgatcgacctgcaagagctggggaagtacgagcaaggctccggctatatccccgaggctcctagagatggccaggcctatgttcggaaggacggcgaatgggtgctgctgagcactttcctggggagaagcctggaagtgctgtttcaaggccctggccaccaccatcaccatcatcatcacagcgcttggagccatcctcagttcgagaaaggcggaggatctggcggaggtggaagcggtggatctgcttggtcacacccacagtttgagaagtgatga

SEQ ID NO: 119 - DNA, 3816 bp, Artificial Sequence
  Description of Artificial Sequence: Synthetic polynucleotide
atgtttatctttctgctgtttctgaccctgaccagcggcagcgacctggatagatgcaccaccttcgacgatgtgcaggcccctaactacacccagcacaccagctctatgcggggcgtgtactaccccgacgagatcttcagaagcgacaccctgtatctgacccaggacctgttcctgcctttctacagcaacgtgaccggcttccacaccatcaaccacaccttcgataaccctgtgatccccttcaaggacggcatctactttgccgccaccgagaagtccaacgtcgtcagaggatgggtgttcggcagcaccatgaacaacaagagccagagcgtgatcatcatcaacaacagcaccaacgtggtcatccgggcctgcaacttcgagctgtgcgacaacccattcttcgccgtgtccaagcctatgggcacccagacacacaccatgatcttcgacaacgccttcaactgcaccttcgagtacatcagcgacgccttcagcctggacgtgtccgagaaaagcggcaacttcaagcacctgagggaattcgtgttcaagaacaaggatggcttcctgtacgtgtacaagggctaccagcctatcgacgtcgtgcgggatctgcccagcggcttcaataccctgaagcctatcttcaagctgcccctgggcatcaagatcaccaacttccgggctatcctgaccgccttcctgcctgctcaagatacctggggaacaagcgccgctgcctacttcgtgggctacctgaagccaacaaagttcatgctgaagtacgacgagaacggcaccatcaccgacgccgtggactgtagccaaaatcctctggccgagctgaagtgcagcgtgaagtccttcgagatcgacaagggcatctaccagaccagcaacttcagagtggtgccctccggcgacgttgtgcggttccccaatatcaccaatctgtgccccttcggcgaggtgttcaacgccacaaagttccccagcgtgtacgcctgggagagaaagcggatcagcaactgcgtggccgactacagcgtgctgtacaactccaccagcttcagcaccttcaagtgctacggcgtgtccgccaccaagctgaacgatctgtgcttcagcaatgtgtacgccgacagcttcgtggtcaagggcgacgatgttcgccagattgcccctggacagacaggcgtgatcgccgattacaactacaagctgcctgacgacttcatgggctgcgtgctggcctggaacaccagaaacatcgatgccaccagcaccggcaactacaattacaagtacagatacctgcggcacggcaagctgcggcctttcgagagggatatctccaacgtgccattcagccccgacggcaagccatgtacacctccagcactgaactgctactggcccctgaaggactacggcttttacaccacaagcggcatcggctatcagccctatagagtggtggtcctgtcctttgagctgctgaatgcccctgccacagtgtgcggacctaagctgtctaccgacctgatcaagaaccagtgcgtgaacttcaacttcaacggcctgaccggcaccggcgtgctgacaccaagcagcaagagattccagcctttccagcagttcggccgggatgtgtccgacttcacagattctgtgcgggaccccaagaccagcgagatcctggatatcagcccctgctctttcggcggagtgtccgtgatcacccctggcacaaatgccagctctgaagtggccgtgctgtatcaggacgtgaactgcaccgatgtgcccacagccattcacgccgatcagctgactcccgcctggcggatctatagcacaggcaacaacgtgttccagacacaagccggctgtctgatcggagccgagcatgtggataccagctacgagtgcgacatccctatcggcgctggaatttgcgccagctaccacaccgtgtctagcctgagaagcaccagccagaaatccatcgtggcctacaccatgagcctgggcgccgattcttctatcgcctactccaacaacacaatcgctatccccaccaactttctgatcagcatcaccaccgaagtgatgcccgtgtccatggccaagacctccgtggattgcaacatgtacatctgcggcgacagcaccgagtgcgccaatctgctgctgcagtacggcagcttttgcgcccagctgaatagagccctgagcggaattgccgtggaacaggacagaaacacccgggaagtgttcgcccaagtgaagcagatgtataagacccctacactcaaggacttcggcgggttcaacttctcccagatcctgcctgatcctctgaagcccaccaagcggagcttcatcgaggacctgctgttcaacaaagtgaccctggccgacgccggctttatgaagcagtatggcgagtgcctgggcgacatcaacgccagggatctgatctgcgcccagaagtttaacggactgaccgtgctgcctcctctgctgaccgatgatatgatcgccgcctacacagccgctctggtgtctggtacagctaccgccggatggacatttggagctggtgccgctctgcagatcccctttgctatgcagatggcctaccggttcaatggcatcggcgtggcccagaatgtgctgtacgagaatcagaagcagatcgccaaccagttcaacaaggccatcagccagatccaagagagcctgaccacaacctctacagccctgggaaagctgcaggacgtggtcaaccagaatgctcaggccctgaacaccctggtcaagcagctgagcagcaatttcggcgccatcagctccgtgctgaacgacatcctgagcagactggaccctcctgaggccgaggtgcagatcgacagactgatcacaggcagactgcagagcctgcagacctacgtgacacagcagctgattcgggccgctgagattagagcctctgccaatctggccgccactaagatgagcgagtgtgtcctgggccagagcaagagagtggacttttgcggcaagggctatcacctgatgagcttcccacaggccgctcctcatggcgtggtctttctgcacgtgacatacgtgcccagccaagagcggaacttcacaacagccccagccatctgccacgagggcaaagcctactttcccagagaaggcgtgttcgtgtttaacggcacctcctggtttatcacccagcggaatttcttcagcccgcaaatcatcaccacagacaacaccttcgtgtccggcaactgtgacgtcgtgatcggcatcattaacaataccgtgtacgaccctctgcagcccgagctggacagcttcaaagaggaactggacaagtacttcaagaatcacacaagccccgatgtggacctgggcgatatctccggcatcaatgccagcgtcgtgaacatccaagaggaaatcgaccggctgaacgaggtggccaagaacctgaacgagtccctgatcgacctgcaagagctggggaagtacgagcaaggctccggctatatccccgaggctcctagagatggccaggcctatgttcggaaggacggcgaatgggtgctgctgagcactttcctggggagaagcctggaagtgctgtttcaaggccctggccaccaccatcatcaccatcaccactccgcatggtcccatcctcagttcgagaaaggcggaggatctggcggaggtggaagcggtggatctgcttggagccatccacagtttgaaaagtgatga

SEQ ID NO: 120 - DNA, 3816 bp, Artificial Sequence
  Description of Artificial Sequence: Synthetic polynucleotide
atgtttatctttctgctgtttctgaccctgaccagcggcagcgacctggatagatgcaccaccttcgacgatgtgcaggcccctaactacacccagcacaccagctctatgcggggcgtgtactaccccgacgagatcttcagaagcgacaccctgtatctgacccaggacctgttcctgcctttctacagcaacgtgaccggcttccacaccatcaaccacaccttcggcaaccctgtgatccccttcaaggacggcatctactttgccgccaccgagaagtccaacgtcgtcagaggatgggtgttcggcagcaccatgaacaacaagagccagagcgtgatcatcatcaacaacagcaccaacgtggtcatccgggcctgcaacttcgagctgtgcgacaacccattcttcgccgtgtccaagcctatgggcacccagacacacaccatgatcttcgacaacgccttcaactgcaccttcgagtacatcagcgacgccttcagcctggacgtgtccgagaaaagcggcaacttcaagcacctgagggaattcgtgttcaagaacaaggatggcttcctgtacgtgtacaagggctaccagcctatcgacgtcgtgcgggatctgcccagcggcttcaataccctgaagcctatcttcaagctgcccctgggcatcaacatcaccaacttcagagccatcctgaccgctttcagccccgctcaggatatctggggaacaagcgccgctgcctacttcgtgggctacctgaagccaaccaccttcatgctgaagtacgacgagaacggcaccatcaccgacgccgtggactgtagccaaaatcctctggccgagctgaagtgcagcgtgaagtccttcgagatcgacaagggcatctaccagaccagcaatttcagagtggtgccctccggggatgtcgtgcggttccccaacatcacaaatctgtgccccttcggcgaggtgttcaacgccacaaagttccccagcgtgtacgcctgggagagaaagaaaatcagcaactgcgtggccgactacagcgtgctgtacaactccaccttcttcagcaccttcaagtgctacggcgtgtccgccaccaagctgaacgatctgtgcttcagcaatgtgtacgccgacagcttcgtggtcaagggcgacgatgttcgccagattgcccctggacagacaggcgtgatcgccgattacaactacaagctgcctgacgacttcatgggctgcgtgctggcctggaacaccagaaacatcgatgccaccagcaccggcaactacaattacaagtacagatacctgcggcacggcaagctgcggcctttcgagagggatatctccaacgtgccattcagccctgacggcaagccttgcacacctcctgctctgaactgctactggcccctgaacgactacggcttttacaccaccacaggcatcggctatcagccctatagagtggtggtcctgtcctttgagctgctgaatgcccctgccacagtgtgcggacctaagctgtctaccgacctgatcaagaaccagtgcgtgaacttcaacttcaacggcctgaccggcaccggcgtgctgacaccaagcagcaagagattccagcctttccagcagttcggccgggatgtgtccgacttcacagattctgtgcgggaccccaagaccagcgagatcctggatatcagcccctgtgcctttggcggagtgtccgtgatcacccctggcacaaatgcctctagcgaagtggccgtgctgtatcaggacgtgaactgcaccgatgtgtccaccgccattcacgccgatcagctgactcccgcttggcggatctatagcacaggcaacaacgtgttccagacacaagccggctgtctgatcggagccgagcatgtggataccagctacgagtgcgacatccctatcggcgctggcatctgtgcctcttaccacaccgtgtctctgctgcggagcaccagccagaaatccatcgtggcctacaccatgagcctgggcgccgattcttctatcgcctactccaacaacacaatcgctatccccaccaatttcagcatctccatcaccaccgaagtgatgcccgtgtccatggccaagacctccgtggattgcaacatgtacatctgcggcgacagcaccgagtgcgccaatctgctgctgcagtacggcagcttctgcacccagctgaatagagccctgtctggaattgccgccgagcaggacagaaacaccagagaagtgttcgcccaagtgaagcagatgtataagaccccgacactcaagtacttcggcgggttcaacttctcccagatcctgcctgatcctctgaagcccaccaagcggagcttcatcgaggacctgctgttcaacaaagtgaccctggccgacgccggctttatgaagcagtatggcgagtgcctgggcgacatcaacgccagggatctgatttgcgcccagaagtttaacggactgaccgtgctgcctcctctgctgaccgatgatatgatcgccgcctacacagccgctctggtgtctggtacagctaccgccggatggacatttggagctggtgccgctctgcagatcccctttgctatgcagatggcctaccggttcaacggcatcggagtgacccagaatgtgctgtacgagaatcagaagcagatcgccaatcagttcaacaaggccatcagccagatccaagagagcctgaccaccacaagcacagccctgggaaagctgcaggacgtggtcaaccagaatgctcaggccctgaacaccctggtcaagcagctgagcagcaacttcggcgccatcagctccgtgctgaacgacatcctgagcagactggaccctcctgaggccgaggtgcagatcgacagactgatcacaggcagactgcagagcctgcagacctacgtgacacagcagctgatcagagccgccgagattagagcctctgccaatctggccgccactaagatgagcgagtgtgtcctgggccagagcaagagagtggacttttgcggcaagggctatcacctgatgagcttcccacaggccgctcctcatggcgtggtctttctgcacgtgacatacgtgcccagccaagagcggaacttcacaacagccccagccatctgccacgagggcaaagcctactttcccagagaaggcgtgttcgtgtttaacggcacctcctggtttatcacccagcggaatttcttcagcccgcaaatcatcaccacagacaacaccttcgtgtccggcaactgtgacgtcgtgatcggcatcattaacaataccgtgtacgaccctctgcagcccgagctggacagcttcaaagaggaactggataagtacttcaagaatcacacaagccccgacgtggacctgggcgatatctctggaatcaacgcctccgtcgtgaacatccagaaagagatcgaccggctgaacgaggtggccaagaacctgaacgagtccctgatcgacctgcaagagctggggaagtacgagcaaggctccggctatatccccgaggctcctagagatggccaggcctatgttcggaaggacggcgaatgggtgctgctgagcactttcctggggagaagcctggaagtgctgtttcaaggccctggccaccaccatcaccatcatcatcacagcgcttggagccatcctcagttcgagaaaggcggaggatctggcggaggtggaagcggtggatctgcttggtcacacccacagtttgagaagtgatga

SEQ ID NO: 121 - DNA, 3858 bp, Artificial Sequence
  Description of Artificial Sequence: Synthetic polynucleotide
atgttcgtgtttctgttcgtgctgcccctggtgtccagccagtgtgtgaatctgaccaccagaacaggcatccctccaggctacaccaacagcagcacacggggcgtgtactaccccgacaaggtgttcagaagcagcatcctgcatctgacccaggacctgttcctgcctttcttcagcaacgtgacctggttcaacaccatccacctgaactaccaaggcggcttcaagaaattcgacaaccccgtgctgcctttcaacgacggggtgtactttgccagcaccgagaagtccaacatcatcagaggctggatcttcggcaccacactggacgccagaacacagagcctgctgatcgtgaacaacgccaccaacgtggtcatcaaagtgtgcgagttccagttctgcacagacccctttctgggcgtctactatcataacaacaacaagacctgggtcgagaacgagttccgggtgtacagcagcgccaacaactgcaccttcgagtatatcagccagcctttcctgatggacctggaaggcaagcagggcaacttcaagaacctgcgcgagttcgtgttcaagaacgtggacggctacttcaagatctacagcaagcacacccctatcgacctcgtgcgggatctgcctagaggattcgctgctctggaacccctggtggatctgcccatcggcatcaacatcacccggtttcagacactgctggccctgcacagaagctacctgacacctggcaagctggaaagcggatggacaacaggcgccgctgcctactatgtgggctacctgcagcagagaaccttcctgctgagctacaaccagaacggcaccatcaccgacgccgtggactgttctctcgatcccctgagcgagacaaagtgcaccctgaagtccctgaccgtggaaaagggcatctaccagaccagcaacttccgggtgcagcccaccatcagcatcgtgcggttccccaatatcaccaatctgtgccccttcggcgaggtgttcaacgccagcaagtttgcctctgtgtacgcctggaaccggaagcggatcagcaattgcgtggccgactacagcgtgctgtacaacagcaccagcttcagcaccttcaagtgctacggcgtgtcccctaccaagctgaacgacctgtgcttcacaaacgtgtacgccgacagcttcgtggtcaagggcgacgaagttcggcagattgcccctggacagactggcgtgatcgccgattacaactacaagctgcccgacgacttcaccggctgtgtgattgcctggaacagcgtgaagcaggatgccctgacaggcggcaattacggctacctgtaccggctgttcagaaagagcaagctgaagcccttcgagcgggacatctccaccgagatctatcaggccggcagcaccccttgcaatggccaagttggcctgaactgctactaccctctggaaagatacggctttcaccccaccaccggcgtgaactatcagccctttagagtggtggtgctgagcttcgagctgctgaatggacctgccacagtgtgcggccctaagctgtctacaaccctggtcaaggataagtgcgtgaacttcaacttcaacggcctgaccggcacaggcgtgctgactacaagcaagaagcagttcctgccattccagcagttcggccgggacatcagcgataccacagacgccgttagagatccccagacactggaaatcctggacatcaccccatgcagcttcggcggagtgtctgtgatcacccctggcaccaataccagcaaccaggtggccgtgctgtatcaggacgtgaactgtaccgaggtgcccatggccattcacgccgaacaactgacccctgcttggagagtgtatagcgctggcgccaacgtgttccagacaagagccggatgtctcgtgggagccgagcacgtgaacaatagctacgagtgcgacatccctgtcggagccggcatctgtgccagctaccacagcatgagcagcttcagaagcgtgaaccagcggagcatcattgcctacaccatgagcctgggcgccgagaatagcgtggcctacagcaacaactctatcgctatccccaccaacttcaccatctccgtgaccacagagatcctgcctgtgtccatgaccaagaccagcgtggactgcaccatgtacatctgcggcgacagcatcgagtgcagcaacctgctgctgcagtacggcagcttctgcacccagctgaatagagccctgaccggaatcgccgtggaacaggacaagaacacccaagaggtgttcgcccaagtgaagcagatctacaagacccctcctatcaaggacttcggcggctttaacttcctgcagattctgcccgatcctagcaagcccagcaagcggagcttcatcgaggacctgctgttcaacaaagtgacactggccgacgccggcttcatcaagcagtatggcgattgtctgggcgacattgccgccagggatctgatttgcgcccagaagtttaacggactgacagtgctgcctcctctgctgaccgatgagatgatcgcccagtacacatctgccctgctggccggcacaatcacaagcggctggacatttggagctggcgccgctctgcagatcccctttgctatgcagatggcctaccggttcaacggcatcggcgtgacccagaatgtgctgtacgagaaccagaagctgatcgccaaccagttcaacagcgccatcggcaagatccaggacagcctgtctagcacagccagcgctctgggaaagctgcaggacgtggtcaaccagaatgctcaggccctgaacacactggtcaagcagctgagcagcaatttcggcgccatcagctccgtgctgaacgatatcctgagccggctggaccctcctgaagccgaggtgcagatcgacagactgatcaccggaaggctgcagtccctgcagacctacgttacccagcagctgatcagagccgccgagattagagcctctgccaatctggccgccaccaagatgtctgagtgtgtgctgggccagagcaagagagtggacttttgcggcaagggctaccacctgatgagcttccctcagtctgctcctcacggcgtggtgtttctgcacgtgacatacgtgcccgctcaagagaagaatttcaccaccgctccagccatctgccacgagggcaaagcccactttcctagagaaggcgtgttcgtgtccaatggcacccactggttcatcacccagcggaacttctacgagccccagatcatcaccaccgacaacacctttgtgtccggcagctgcgacgtcgtgatcggcattgtgaacaataccgtgtacgaccctctgcagcccgagctggacagcttcaaagaggaactggacaagtactttaagaaccacacaagccccgacgtggacctgggcgatatcagcggaatcaatgccagcgtcgtgaacatccagaaagagatcgaccggctgaacgaggtggccaagaatctgaacgagagcctgatcgacctgcaagagctggggaagtacgagcaaggctccggctatatccccgaggctcctagagatggccaggcctatgttcggaaggatggcgaatgggtgctgctgagcactttcctggggagaagcctggaagtgctgtttcaaggccctggccaccaccatcatcaccatcaccacagcgcttggagccatcctcagttcgagaaaggcggaggatctggcggaggtggaagtggcggatctgcttggtcacacccacagtttgagaagtgatga

SEQ ID NO: 122 - DNA, 3852 bp, Artificial Sequence
  Description of Artificial Sequence: Synthetic polynucleotide
atgttcgtgtttctgttcgtgctgcccctggtgtccagccagtgtgtgaatctgaccaccagaacaggcatccctccaggctacaccaacagcagcacacggggcgtgtactaccccgacaaggtgttcagaagcagcatcctgcatctgacccaggacctgttcctgcctttcttcagcaacgtgacctggttcaacaccatcacctaccaaggcggcagcaagaaattcgacaaccccgtgctgcctttcaacgacggggtgtactttgccagcaccgagaagtccaacatcatcagaggctggatcttcggcaccacactggacgccagaacacagagcctgctgatcgtgaacaacgccaccaacgtggtcatcaaagtgtgcgagttccagttctgcacagacccctttctgggcgtctactatcataacaacaacaagacctgggtcgagaacgagttccgggtgtacagcagcgccaacaactgcaccttcgagtatatcagccagcctttcctgatggacctggaaggcaagcagggcaacttcaagaacctgcgcgagttcgtgttcaagaacgtggacggctacttcaagatctacagcaagcacacccctatcgacctcgtgcgggatctgcctagaggattcgctgctctggaacccctggtggatctgcccatcggcatcaacatcacccggtttcagacactgctggccctgcacagaagctacctgacacctggcaagctggaaagcggatggacaacaggcgccgctgcctactatgtgggctacctgcagcagagaaccttcctgctgagctacaaccagaacggcaccatcacagacgccgtggactgttctctggaccctctgagcgagacaaagtgcaccctgaagtccctgaccgtggaaaagggcatctaccagaccagcaacttccgggtgcagcccaccatcagcatcgtgcggttccccaatatcaccaatctgtgccccttcggcgaggtgttcaacgccagcaagtttgcctctgtgtacgcctggaaccggaagcggatcagcaattgcgtggccgactacagcgtgctgtacaacagcaccagcttcagcaccttcaagtgctacggcgtgtcccctaccaagctgaacgacctgtgcttcacaaacgtgtacgccgacagcttcgtggtcaagggcgacgaagttcggcagattgcccctggacagactggcgtgatcgccgattacaactacaagctgcccgacgacttcaccggctgtgtgattgcctggaacagcgtgaagcaggatgccctgaccggcgacaattacggctacctgtaccggctgttcagaaagagcaagctgaagcccttcgagcgggacatctccaccgagatctatcaggccggcagcaccccttgcaatggccaagttggcctgaactgctactaccctctggaaagatacggctttcaccccaccaccggcgtgaactaccagccattcagagtggtggtgctgagcttcgagctgctgaatggacctgccacagtgtgcggccctaagctgtctacaaccctggtcaaggataagtgcgtgaacttcaacttcaacggcctgaccggaaccggcgtgctgactacaagcaagaagcagttcctgccattccagcagttcggccgggacatcagcgataccacagatgccgtcagagatccccagacactggaaatcctggacatcaccccatgcagcttcggcggagtgtctgtgatcacccctggcaccaataccagcaaccaggtggccgtgctgtatcaggacgtgaactgtaccgaggtgcccatggccattcacgccgaacaactgacccctgcttggagagtgtatagcgctggcgccaacgtgttccagacaagagccggatgtctcgtgggagccgagcacgtgaacaatagctacgagtgcgacatccctgtcggagccggcatttgtgccagctaccacagcatgagcagcttcagaagcgtgaaccagcggagcatcattgcctacaccatgagcctgggcgccgagaatagcgtggcctacagcaacaactctatcgctatccccaccaacttcaccatctccgtgaccacagagatcctgcctgtgtccatgaccaagaccagcgtggactgcaccatgtacatctgcggcgacagcatcgagtgcagcaacctgctgctgcagtacggcagcttctgcacccagctgaatagagccctgacagggatcgccgtggaacaggacaagaacacccaagaggtgttcgcccaagtgaagcagatctacaagacccctcctatcaaggacttcggcggcttcaatttcagccagattctgcccgatcctagcaagcccagcaagcggagcttcatcgaggacctgctgttcaacaaagtgacactggccgacgccggcttcatcaagcagtatggcgattgtctgggcgacattgccgccagggatctgatttgcgcccagaagtttaacggactgacagtgctgcctcctctgctgaccgatgagatgatcgcccagtacacatctgccctgctggccggcacaatcacaagcggctggacatttggagctggcgccgctctgcagatcccctttgctatgcagatggcctaccggttcaacggcatcggcgtgacccagaatgtgctgtacgagaaccagaagctgatcgccaaccagttcaacagcgccatcggcaagatccaggacagcctgtctagcacagccagcgctctgggaaagctgcaggacgtggtcaaccagaatgctcaggccctgaacacactggtcaagcagctgagcagcaatttcggcgccatcagctccgtgctgaacgatatcctgagccggctggacccacctgaagccgaggtgcagatcgacagactgatcaccggaaggctgcagtccctgcagacctacgttacccagcagctgatcagagccgccgagattagagcctctgccaatctggccgccaccaagatgtctgagtgtgtgctgggccagagcaagagagtggacttttgcggcaagggctaccacctgatgagcttccctcagtctgctcctcacggcgtggtgtttctgcacgtgacatacgtgcccgctcaagagaagaatttcaccaccgctccagccatctgccacgagggcaaagcccactttcctagagaaggcgtgttcgtgtccaatggcacccactggttcatcacccagcggaacttctacgagccccagatcatcaccaccgacaacacctttgtgtccggcagctgcgacgtcgtgatcggcattgtgaacaataccgtgtacgaccctctgcagcccgagctggacagcttcaaagaggaactggacaagtactttaagaaccacacaagccccgacgtggacctgggcgatatcagcggaatcaatgccagcgtcgtgaacatccagaaagagatcgaccggctgaacgaggtggccaagaatctgaacgagagcctgatcgacctgcaagagctggggaagtacgagcaaggctccggctatatccccgaggctcctagagatggccaggcctatgttcggaaggatggcgaatgggtgctgctgagcactttcctggggagaagcctggaagtgctgtttcaaggccctggccaccaccatcatcaccatcaccacagcgcttggagccatcctcagttcgagaaaggcggaggatctggcggaggtggaagtggcggatctgcttggtcacacccacagtttgagaagtgatga

SEQ ID NO: 123 - DNA, 3852 bp, Artificial Sequence
  Description of Artificial Sequence: Synthetic polynucleotide
atgttcgtgtttctgttcgtgctgcccctggtgtccagccagtgtgtgaatctgaccaccagaacaggcatccctccaggctacaccaacagcagcacacggggcgtgtactaccccgacaaggtgttcagaagcagcatcctgcatctgacccaggacctgttcctgcctttcttcagcaacgtgacctggttcaacaccatcaactaccaaggcggcttcaagaaattcgacaaccccgtgctgcctttcaacgacggggtgtactttgccagcaccgagaagtccaacatcatcagaggctggatcttcggcaccacactggacgccagaacacagagcctgctgatcgtgaacaacgccaccaacgtggtcatcaaagtgtgcgagttccagttctgcacagacccctttctgggcgtctactatcataacaacaacaagacctgggtcgagaacgagttccgggtgtacagcagcgccaacaactgcaccttcgagtatatcagccagcctttcctgatggacctggaaggcaagcagggcaacttcaagaacctgcgcgagttcgtgttcaagaacgtggacggctacttcaagatctacagcaagcacacccctatcgacctcgtgcgggatctgcctagaggattcgctgctctggaacccctggtggatctgcccatcggcatcaacatcacccggtttcagacactgctggccctgcacagaagctacctgacacctggcaagctggaaagcggatggacaacaggcgccgctgcctactatgtgggctacctgcagcagagaaccttcctgctgagctacaaccagaacggcaccatcaccgacgccgtggactgttctctcgatcccctgagcgagacaaagtgcaccctgaagtccctgaccgtggaaaagggcatctaccagaccagcaacttccgggtgcagcccaccatcagcatcgtgcggttccccaatatcaccaatctgtgccccttcggcgaggtgttcaacgccagcaagtttgcctctgtgtacgcctggaaccggaagcggatcagcaattgcgtggccgactacagcgtgctgtacaacagcaccagcttcagcaccttcaagtgctacggcgtgtcccctaccaagctgaacgacctgtgcttcacaaacgtgtacgccgacagcttcgtggtcaagggcgacgaagttcggcagattgcccctggacagactggcgtgatcgccgattacaactacaagctgcccgacgacttcaccggctgtgtgattgcctggaacagcgtgaagcaggatgccctgacaggcggcaattacggctacctgtaccggctgttcagaaagagcaagctgaagcccttcgagcgggacatctccaccgagatctatcaggccggcagcaccccttgcaatggccaagttggcctgaactgctactaccctctggaaagatacggctttcaccccaccaccggcgtgaactaccagccattcagagtggtggtgctgagcttcgagctgctgaatggacctgccacagtgtgcggccctaagctgtctacaaccctggtcaaggataagtgcgtgaacttcaacttcaacggcctgaccggcacaggcgtgctgactacaagcaagaagcagttcctgccattccagcagttcggccgggacatcagcgataccacagacgccgttagagatccccagacactggaaatcctggacatcaccccatgcagcttcggcggagtgtctgtgatcacccctggcaccaataccagcaaccaggtggccgtgctgtatcaggacgtgaactgtaccgaggtgcccatggccattcacgccgaacaactgacccctgcttggagagtgtatagcgctggcgccaacgtgttccagacaagagccggatgtctcgtgggagccgagcacgtgaacaatagctacgagtgcgacatccctgtcggagccggcatctgtgccagctaccacagcatgagcagcttcagaagcgtgaaccagcggagcatcattgcctacaccatgagcctgggcgccgagaatagcgtggcctacagcaacaactctatcgctatccccaccaacttcaccatctccgtgaccacagagatcctgcctgtgtccatgaccaagaccagcgtggactgcaccatgtacatctgcggcgacagcatcgagtgcagcaacctgctgctgcagtacggcagcttctgcacccagctgaatagagccctgaccggaatcgccgtggaacaggacaagaacacccaagaggtgttcgcccaagtgaagcagatctacaagacccctcctatcaaggacttcggcggctttaacttcagccagattctgcccgatcctagcaagcccagcaagcggagcttcatcgaggacctgctgttcaacaaagtgacactggccgacgccggcttcatcaagcagtatggcgattgtctgggcgacattgccgccagggatctgatttgcgcccagaagtttaacggactgacagtgctgcctcctctgctgaccgatgagatgatcgcccagtacacatctgccctgctggccggcacaatcacaagcggctggacatttggagctggcgccgctctgcagatcccctttgctatgcagatggcctaccggttcaacggcatcggcgtgacccagaatgtgctgtacgagaaccagaagctgatcgccaaccagttcaacagcgccatcggcaagatccaggacagcctgtctagcacagccagcgctctgggaaagctgcaggacgtggtcaaccagaatgctcaggccctgaacacactggtcaagcagctgagcagcaatttcggcgccatcagctccgtgctgaacgatatcctgagccggctggaccctcctgaagccgaggtgcagatcgacagactgatcaccggaaggctgcagtccctgcagacctacgttacccagcagctgatcagagccgccgagattagagcctctgccaatctggccgccaccaagatgtctgagtgtgtgctgggccagagcaagagagtggacttttgcggcaagggctaccacctgatgagcttccctcagtctgctcctcacggcgtggtgtttctgcacgtgacatacgtgcccgctcaagagaagaatttcaccaccgctccagccatctgccacgagggcaaagcccactttcctagagaaggcgtgttcgtgtccaatggcacccactggttcatcacccagcggaacttctacgagccccagatcatcaccaccgacaacacctttgtgtccggcagctgcgacgtcgtgatcggcattgtgaacaataccgtgtacgaccctctgcagcccgagctggacagcttcaaagaggaactggacaagtactttaagaaccacacaagccccgacgtggacctgggcgatatcagcggaatcaatgccagcgtcgtgaacatccagaaagagatcgaccggctgaacgaggtggccaagaatctgaacgagagcctgatcgacctgcaagagctggggaagtacgagcaaggctccggctatatccccgaggctcctagagatggccaggcctatgttcggaaggatggcgaatgggtgctgctgagcactttcctggggagaagcctggaagtgctgtttcaaggccctggccaccaccatcatcaccatcaccacagcgcttggagccatcctcagttcgagaaaggcggaggatctggcggaggtggaagtggcggatctgcttggtcacacccacagtttgagaagtgatga

SEQ ID NO: 124 - DNA, 3846 bp, Artificial Sequence
  Description of Artificial Sequence: Synthetic polynucleotide
atgttcgtgtttctgttcgtgctgcccctggtgtccagccagtgtgtgaatctgaccaccagaaccggcatccagcctggctacaccaacagctctaccagaggcgtgtactaccccgacaaggtgttcagaagcagcatcctgcatctgacccaggacctgttcctgcctttcttcagcaacgtgacctggttcaacaccatcaactaccaaggcggcttcaagaaattcgacaaccccgtgctgcctttcaacgacggggtgtactttgccagcaccgagaagtccaacatcatcagaggctggatcttcggcaccacactggacgccagaacacagagcctgctgatcgtgaacaacgccaccaacgtggtcatcaaagtgtgcgagttccagttctgcacagacccctttctgggcgtctactaccataacaacaacaagacctgggtcgagaacgagttccgggtgtacagcagcgccaacaactgcaccttcgagtatatcagccagcctttcctgatggacctggaaggcaagcagggcaacttcaagaacctgcgcgagttcgtgttcaagaacgtggacggctacttcaagatctacagcaagcacacccctatcgacctcgtgcgggatctgcctagaggattcgctgctctggaacccctggtggatctgcccatcggcatcaacatcacccggtttcagacactgctggccctgcacagaagctacctgacacctggcaagctggaaagcggatggacaacaggcgccgctgcctactatgtgggctacctgcagcagagaaccttcctgctgagctacaaccagaacggcaccatcaccgacgccgtggactgttctctcgatcccctgagcgagacaaagtgcaccctgaagtccctgaccgtggaaaagggcatctaccagaccagcaacttccgggtgcagcccaccatcagcatcgtgcggttccccaatatcaccaatctgtgccccttcggcgaggtgttcaacgccagcaagtttgcctctgtgtacgcctggaaccggaagcggatcagcaattgcgtggccgactacagcgtgctgtacaacagcaccagcttcagcaccttcaagtgctacggcgtgtcccctaccaagctgaacgacctgtgcttcacaaacgtgtacgccgacagcttcgtggtcaagggcgacgaagttcggcagattgcccctggacagactggcgtgatcgccgattacaactacaagctgcccgacgacttcaccggctgtgtgattgcctggaacagcgtgaagcaggatgccctgacaggcggcaactacctgtaccggctgttcagaaagagcaagctgaagcccttcgagcgggacatctccaccgagatctatcaggccggcagcaccccttgcaatggccaagttggcctgaactgctactaccctctggaaagatacggctttcaccccaccaccggcgtgaactaccagccattcagagtggtggtgctgagcttcgagctgctgaatggacctgccacagtgtgcggccctaagctgtctacaaccctggtcaaggataagtgcgtgaacttcaacttcaacggcctgaccggcacaggcgtgctgactacaagcaagaagcagttcctgccattccagcagttcggccgggacatcagcgataccacagacgccgttagagatccccagacactggaaatcctggacatcaccccatgcagcttcggcggagtgtctgtgatcacccctggcaccaacaccagcaatcaggtggccgtgctgtatcaggacgtgaactgtaccgaggtgcccatggccattcacgccgaacaactgacccctgcttggagagtgtatagcgctggcgccaacgtgttccagacaagagccggatgtctcgtgggagccgagcacgtgaacaatagctacgagtgcgacatccctgtcggagccggcatctgtgccagctaccactctatgagcagcctgagaagcgtgaaccagcggagcatcattgcctacaccatgagcctgggcgccgagaatagcgtggcctacagcaacaactctatcgctatccccaccaacttcaccatctccgtgaccacagagatcctgcctgtgtccatgaccaagaccagcgtggactgcaccatgtacatctgcggcgacagcatcgagtgcagcaacctgctgctgcagtacggcagcttctgcacccagctgaatagagccctgaccggaatcgccgtggaacaggacaagaacacccaagaggtgttcgcccaagtgaagcagatctacaagacccctcctatcaaggacttcggcggctttaacttcagccagattctgcccgatcctagcaagcccagcaagcggagcttcatcgaggacctgctgttcaacaaagtgacactggccgacgccggcttcatcaagcagtatggcgattgtctgggcgacattgccgccagggatctgatttgcgcccagaagtttaacggactgacagtgctgcctcctctgctgaccgatgagatgatcgcccagtacacatctgccctgctggccggcacaatcacaagcggctggacatttggagctggcgccgctctgcagatcccctttgctatgcagatggcctaccggttcaacggcatcggcgtgacccagaatgtgctgtacgagaaccagaagctgatcgccaaccagttcaacagcgccatcggcaagatccaggacagcctgagcagcacagcaagcgccctgggaaagctgcaggacgtggtcaaccagaatgctcaggccctgaacacactggtcaagcagctgtccagcaatttcggcgccatcagctccgtgctgaacgatatcctgagccggctggaccctcctgaagccgaggtgcagatcgacagactgatcaccggaaggctgcagtccctgcagacctacgttacccagcagctgatcagagccgccgagattagagcctctgccaatctggccgccaccaagatgtctgagtgtgtgctgggccagagcaagagagtggacttttgcggcaagggctatcacctgatgagcttccctcagtctgcccctcacggcgtggtgtttctgcacgtgacatacgtgcccgctcaagagaagaatttcaccaccgctccagccatctgccacgagggcaaagcccactttcctagagaaggcgtgttcgtgtccaatggcacccactggttcatcacccagcggaacttctacgagccccagatcatcaccaccgacaacacctttgtgtccggcagctgcgacgtcgtgatcggcattgtgaacaataccgtgtacgaccctctgcagcccgagctggactccttcaaagaggaactggacaagtactttaagaaccacacaagccccgacgtggacctgggcgatatcagcggaatcaatgccagcgtcgtgaacatccagaaagagatcgaccggctgaacgaggtggccaagaatctgaacgagagcctgatcgacctgcaagagctggggaagtacgagcaaggctccggctatatccccgaggctcctagagatggccaggcctatgttcggaaggatggcgaatgggtgctgctgagcactttcctggggagaagcctggaagtgctgtttcaaggccctggccaccaccatcatcaccatcaccacagcgcttggagccatcctcagttcgagaaaggcggaggatctggcggaggtggaagtggcggatctgcttggtcacacccacagtttgagaagtgatga

SEQ ID NO: 125 - DNA, 3852 bp, Artificial Sequence
  Description of Artificial Sequence: Synthetic polynucleotide
atgttcgtgtttctgttcgtgctgcccctggtgtccagccagtgtgtgaatctgaccaccagaacaggcatccctccaggctacaccaacagcagcacacggggcgtgtactaccccgacaaggtgttcagaagcagcatcctgcatctgacccaggacctgttcctgcctttcttcagcaacgtgacctggttcaacaccatcaactaccaaggcggcttcaagaaattcgacaaccccgtgctgcctttcaacgacggggtgtactttgccagcaccgagaagtccaacatcatcagaggctggatcttcggcaccacactggacgccagaacacagagcctgctgatcgtgaacaacgccaccaacgtggtcatcaaagtgtgcgagttccagttctgcacagacccctttctgggcgtctactatcataacaacaacaagacctgggtcgagaacgagttccgggtgtacagcagcgccaacaactgcaccttcgagtatatcagccagcctttcctgatggacctggaaggcaagcagggcaacttcaagaacctgcgcgagttcgtgttcaagaacgtggacggctacttcaagatctacagcaagcacacccctatcgacctcgtgcgggatctgcctagaggattcgctgctctggaacccctggtggatctgcccatcggcatcaacatcacccggtttcagacactgctggccctgcacagaagctacctgacacctggcaatctggaaagcggctggactacaggcgccgctgcctactatgtgggctacctgcagcagagaaccttcctgctgagctacaaccagaacggcaccatcaccgacgccgtggactgttctctcgatcccctgagcgagacaaagtgcaccctgaagtccctgaccgtggaaaagggcatctaccagaccagcaacttccgggtgcagcccaccatcagcatcgtgcggttccccaatatcaccaatctgtgccccttcggcgaggtgttcaacgccagcaagtttgcctctgtgtacgcctggaaccggaagcggatcagcaattgcgtggccgactacagcgtgctgtacaacagcaccagcttcagcaccttcaagtgctacggcgtgtcccctaccaagctgaacgacctgtgcttcacaaacgtgtacgccgacagcttcgtggtcaagggcgacgaagttcggcagattgcccctggacagacaggcgtgatcgccgattacaactacaagctgcccgacgacttcaccggctgtgtgattgcctggaacagcgtgaagcaggatgccctgacaggcggcaattacggctacctgtaccggctgttcagaaagagcaagctgaagcccttcgagcgggacatctccaccgagatctatcaggccggcagcaccccttgcaatggccaagttggcctgaactgctactaccctctggaaagatacggctttcaccccaccaccggcgtgaactaccagccattcagagtggtggtgctgagcttcgagctgctgaatggacctgccacagtgtgcggccctaagctgtctacaaccctggtcaaggataagtgcgtgaacttcaacttcaacggcctgaccggcacaggcgtgctgactacaagcaagaagcagttcctgccattccagcagttcggccgggacatcagcgataccacagacgccgttagagatccccagacactggaaatcctggacatcaccccatgcagcttcggcggagtgtctgtgatcacccctggcaccaataccagcaaccaggtggccgtgctgtatcaggacgtgaactgtaccgaggtgcccatggccattcacgccgaacaactgacccctgcttggagagtgtatagcgctggcgccaacgtgttccagacaagagccggatgtctcgtgggagccgagcacgtgaacaatagctacgagtgcgacatccctgtcggagccggcatctgtgccagctaccactctatgagcagcctgagaagcgtgaaccagcggagcatcattgcctacaccatgagcctgggcgccgagaatagcgtggcctacagcaacaactctatcgctatccccaccaacttcaccatctccgtgaccacagagatcctgcctgtgtccatgaccaagaccagcgtggactgcaccatgtacatctgcggcgacagcatcgagtgcagcaacctgctgctgcagtacggcagcttctgcacccagctgaatagagccctgaccggaatcgccgtggaacaggacaagaacacccaagaggtgttcgcccaagtgaagcagatctacaagacccctcctatcaaggacttcggcggctttaacttcagccagattctgcccgatcctagcaagcccagcaagcggagcttcatcgaggacctgctgttcaacaaagtgacactggccgacgccggcttcatcaagcagtatggcgattgtctgggcgacattgccgccagggatctgatttgcgcccagaagtttaacggactgacagtgctgcctcctctgctgaccgatgagatgatcgcccagtacacatctgccctgctggccggcacaatcaccagcggatggacatttggagctggcgccgctctgcagatcccctttgctatgcagatggcctaccggttcaacggcatcggcgtgacccagaatgtgctgtacgagaaccagaagctgatcgccaaccagttcaacagcgccatcggcaagatccaggacagcctgagcagtacagccagcgctctgggaaagctgcaggacgtggtcaaccagaatgctcaggccctgaacacactggtcaagcagctgagcagcaatttcggcgccatcagctccgtgctgaacgatatcctgagccggctggaccctcctgaagccgaggtgcagatcgacagactgatcaccggaaggctgcagtccctgcagacctacgttacccagcagctgatcagagccgccgagattagagcctctgccaatctggccgccaccaagatgtctgagtgtgtgctgggccagagcaagagagtggacttttgcggcaagggctatcacctgatgagcttccctcagtctgcccctcacggcgtggtgtttctgcacgtgacatacgtgcccgctcaagagaagaatttcaccaccgctccagccatctgccacgagggcaaagcccactttcctagagaaggcgtgttcgtgtccaatggcacccactggttcatcacccagcggaacttctacgagccccagatcatcaccaccgacaacacctttgtgtccggcagctgcgacgtcgtgatcggcattgtgaacaataccgtgtacgaccctctgcagcccgagctggacagcttcaaagaggaactggacaagtactttaagaaccacacaagccccgacgtggacctgggcgatatcagcggaatcaatgccagcgtcgtgaacatccagaaagagatcgaccggctgaacgaggtggccaagaatctgaacgagagccccatcgacctgcaagagctggggaagtacgagcaaggctccggctatatccccgaggctcctagagatggccaggcctatgttcggaaggatggcgaatgggtgctgctgagcactttcctggggagaagcctggaagtgctgtttcaaggccctggccaccaccatcatcaccatcaccacagcgcttggagccatcctcagttcgagaaaggcggaggatctggcggaggtggaagtggcggatctgcttggtcacacccacagtttgagaagtgatga

SEQ ID NO: 126 - DNA, 3819 bp, Artificial Sequence
  Description of Artificial Sequence: Synthetic polynucleotide
atgaagctgctggtgctggtgtttgccacactggtgtccagctacaccatcgagaagtgcctggacttcgacgacagaacccctcctgccaacacacagtttctgagcagccaccggggcgtgtactaccccgacgacatcttcagatccaacgtgctgcatctggtgcaggaccacttcctgcctttcgacagcaacgtgacccggttcatcaccttcggcctgaacttcgataaccctatcatccccttccgcgacggcatctactttgccgccaccgagaagtccaacgtgatcagaggatgggtgttcggcagcaccatgaacaacaagagccagagcgtgatcatcatgaacaatagcaccaacctggtcatccgggcctgcaatttcgagctgtgcgacaacccattcttcgtggtgctgaagtctaacaacactcagatccccagctacatcttcaacaacgccttcaactgcaccttcgagtacgtgtccaaggacttcaacctggacctgggcgagaagcccggcaactttaaggacctgcgcgagttcgtgttcagaaacaaggacggcttcctgcacgtgtacagcggctaccagcctatctctgccgcttctggactgcccaccggcttcaatgccctgaagcctatcttcaagctgcccctgggcatcaacatcaccaacttcagaaccctgctgaccgcctttcctcctcggcctgattactggggaacaagcgccgctgcctacttcgtgggctacctgaagccaaccaccttcatgctgaagtacgacgagaacggcaccatcaccgacgccgtggactgtagccaaaatcctctggccgagctgaagtgcagcgtgaagtctttcgagatcgacaagggcatctaccagaccagcaatttcagagtggcccctagcaaagaagtcgtgcggttccccaatatcaccaatctgtgccccttcggcgaggtgttcaacgccaccacatttccctctgtgtacgcctgggagagaaagcggatcagcaactgcgtggccgactacagcgtgctgtacaacagcacctcctttagcaccttcaagtgctacggcgtgtccgccaccaagctgaacgatctgtgcttctccaacgtgtacgccgacagcttcgtggtcaagggcgacgatgtgcggcagattgctcctggacagacaggcgtgatcgccgattacaactacaagctgcctgacgacttcctgggctgtgtgctggcctggaacaccaacagcaaggacagctccaccagcggcaactacaactacctgtacagatgggtccgacgcagcaagctgaatccctacgagagggacctgagcaacgacatctatagccctggcggccagagctgttctgccgtgggacccaattgctacaaccctctgaggccctacggcttctttaccacagctggcgtgggccaccagccttacagagtggtggtgctgtcattcgagctgctgaatgcccctgccacagtgtgtggccctaagctgtctaccgacctgatcaagaaccagtgcgtgaacttcaacttcaacggcctgaccggcaccggcgtgctgacaccaagctccaagagattccagcctttccagcagttcggccgggacgtgtccgatttcacagattctgtgcgggaccccaagaccagcgagatcctggatatcagcccttgcagcttcggcggagtgtccgtgatcacccctggcacaaataccagctctgaggtggccgtgctgtatcaggacgtgaactgcaccgatgtgcccgtggccattcatgccgatcagctgaccccatcttggcgggtgtactccaccggcaacaacgtgttccagacacaagccggctgtctgatcggagccgagcatgtggataccagctacgagtgcgacatccctatcggcgctggcatctgtgccagctaccacacagtgtccagcctgagaagcaccagccagaaatccatcgtggcctacaccatgagcctgggcgccgattcttctatcgcctacagcaacaacacaatcgctatccccaccaatttcagcatctccatcaccaccgaagtgatgcccgtgtccatggccaagacctccgtggattgcaacatgtacatctgcggcgacagcaccgagtgcgccaatctgctgctgcagtacggcagcttctgcacccagctgaatagagccctgagcggaatcgccgtggaacaggacagaaacacccgggaagtgttcgcccaagtgaagcagatgtataagacccctacactgaaggacttcggcgggttcaacttctcccagatcctgcctgatcctctgaagcccaccaagcggagcttcatcgaggacctgctgttcaacaaagtgaccctggccgacgccggctttatgaagcagtatggcgagtgcctgggcgacatcaacgccagggatctgatttgcgcccagaagtttaacggactgaccgtgctgcctcctctgctgacagacgatatgatcgccgcctacacagccgctctggtgtctggtacagctaccgccggatggacatttggagctggcgctgctctgcagatccccttcgctatgcagatggcctaccggttcaatggcatcggcgtgacccagaatgtgctgtacgagaatcagaagcagatcgccaaccagttcaacaaggccatcagccagatccaagagagcctgaccaccacctctacagccctgggaaagctgcaggacgtggtcaaccagaatgctcaggccctgaacaccctggtcaagcagctgagcagcaacttcggcgccatcagctccgtgctgaacgacatcctgagcagactggaccctcctgaagccgaggtgcagatcgacagactgatcaccggaaggctgcagagcctgcagacctacgttacccagcagctgatcagagccgccgagattagagcctctgccaatctggccgctaccaagatgagcgagtgtgtcctgggccagagcaagagagtggacttttgcggcaagggctaccacctgatgagcttccctcaggctgctcctcacggcgtggtctttctgcacgtgacatacgtgcccagccaagagcggaacttcacaacagccccagccatctgccacgagggcaaagcctactttcccagagaaggcgtgttcgtgtttaacggcacctcctggtttatcacccagcggaatttcttcagcccgcaaatcatcaccacagacaacaccttcgtgtccggcagctgcgacgtcgtgatcggaatcatcaacaataccgtgtacgacccactgcagcccgagctggacagcttcaaagaggaactggacaagtacttcaagaatcacacaagccccgatgtggatctgggcgatatcagcggcatcaatgccagcgtcgtgaacatccagaaagagatcgaccggctgaacgaggtggccaagaacctgaacgagtccctgatcgacctgcaagagctggggaagtacgagcaaggctccggctatatccccgaggctcctagagatggccaggcctatgttcggaaggacggcgaatgggtgctgctgagcactttcctgggcagatctctggaagtgctgtttcaaggccctggccaccaccatcaccatcatcatcacagcgcttggagccatcctcagttcgagaaaggcggaggatctggcggaggtggaagtggtggatctgcttggtcacacccacagtttgagaagtgatga

SEQ ID NO: 127 - DNA, 3858 bp, Artificial Sequence
  Description of Artificial Sequence: Synthetic polynucleotide
atgttcgtgtttctggtgctgctgcctctggtgtccagccagtgtgtgaacctgaccaccagaacacagctgcctccagcctacaccaacagcagcacaagaggcgtgtactaccccgacaaggtgttcagatccagcgtgctgcatctgacccaggacctgttcctgcctttcttcagcaacgtgacctggttccacgccatccacgtgtccggcaccaacggcatcaagagattcgacaaccccgtgctgcccttcaacgacggggtgtactttgccagcaccgagaagtccaacatcatcagaggctggatcttcggcaccacactggacagcaagacccagagcctgctgatcgtgaacaacgccaccaacgtggtcatcaaagtgtgcgagttccagttctgcaacgaccccttcctgggcgtctactaccacaagaacaacaagagctggatggaaagcgagttccgggtgtacagcagcgccaacaactgcaccttcgagtacgtgtcccagcctttcctgatggacctggaaggcaagcagggcaacttcaagaacctgcgcgagttcgtgttcaagaacatcgacggctacttcaagatctacagcaagcacacccctatcaacctcgtgcgggatctgcctcctggcttctctgctctggaacccctggtggatctgcccatcggcatcaacatcacccggtttcagacactgctggccctgcacagaagctacctgacacctggcgatagcagcagcggatggacagctggtgccgccgcttactatgtgggctacctgcagcctagaaccttcctgctgaagtacaacgagaacggcaccatcaccgacgccgtggattgtgcccttgatcctctgagcgagacaaagtgcaccctgaagtccttcaccgtggaaaagggcatctaccagaccagcaacttccgggtgcagcccaccgatagcatcgtgcggttccccaatatcaccaatctgtgccccttcggcgaggtgttcaatgccaccacattcgcctctgtgtacgcctggaaccggaagcggatcagcaattgcgtggccgactactccgtgctgtacaacagcaccagcttcagcaccttcaagtgctacggcgtgtcccctaccaagctgaacgacctgtgcttcacaaacgtgtacgccgacagcttcgtgatcaccggggatgaagtgcggcagattgcccctggacagacaggcaagatcgccgactacaactacaagctgcccgacgacttcaccggctgtgtgattgcctggaactccaagcacatcgatgccaaagaaggcgggaacttcaactacctgtaccggctgttccggaaggccaacctgaagcctttcgagcgggatatctccaccgagatctaccaggccggcagcaagccttgtaatggccagacaggcctgaactgctactacccactgtacagatacggcttctaccccacagacggcgtgggccaccagccttatagagtggtggtgctgagcttcgagctgctgaatgcccctgccacagtgtgcggccctaagaaaagcaccaatctcgtgaagaacaaatgcgtgaacttcaatttcaacggcctgaccggcaccggcgtgctgacagagagcaacaagaagttcctgccattccagcagttcggccgggatatcgccgataccacagacgccgttagagatccccagacactggaaatcctggacatcaccccttgcagcttcggcggagtgtctgtgatcacccctggcaccaatgccagcaatcaggtggcagtgctgtaccaggacgtgaactgtaccgaagtgcccgtggccattcacgccgatcagctgacacctacatggcgggtgtactccaccggctccaacgtgttccagacaagagccggctgtctgatcggagccgagcacgtgaacaatagctacgagtgcgacatccccatcggcgctggaatctgcgccagctaccagacacagaccaactccagaagcgtggccagccagagcatcattgcctacacaatgtctctgggcgccgagaacagcgtggcctacagcaacaactctatcgctatccccaccaacttcaccatcagcgtgaccacagagatcctgcctgtgtccatgaccaagaccagcgtggactgcaccatgtacatctgcggcgattccaccgagtgcagcaacctgctgctgcagtacggcagcttctgcacccagctgaatagagccctgacagggatcgccgtggaacaggacaagaacacccaagaggtgttcgcccaagtgaagcagatctacaagacccctcctatcaaggacttcggcggcttcaacttcagccagattctgcccgatcctagcaagcccagcaagcggagcttcatcgaggacctgctgttcaacaaagtgacactggccgacgccggcttcatcaagcagtatggcgattgtctgggcgacattgccgccagggatctgatttgcgcccagaagtttaacggactgacagtgctgcctcctctgctgaccgatgagatgatcgcccagtacacatctgccctgctggccggcacaatcacaagcggctggacatttggagcaggcgccgctctgcagatcccctttgctatgcagatggcctaccggttcaatggcatcggagtgacccagaatgtgctgtacgagaaccagaagctgatcgccaaccagttcaacagcgccatcggcaagatccaggacagcctgagcagtacagccagcgctctgggaaagctgcaggacgtggtcaaccagaatgcccaggcactgaacaccctggtcaagcagctgagcagcaatttcggcgccatcagctctgtgctgaacgatatcctgagcagactggaccctcctgaggccgaggtgcagatcgacagactgatcacaggcagactgcagagcctccagacatacgtgacccagcagctgatcagagccgccgagattagagcctctgccaatctggccgccaccaagatgtctgagtgtgtgctgggccagagcaagagagtggacttttgcggcaagggctaccacctgatgagcttccctcagtctgcccctcacggcgtggtgtttctgcacgtgacatatgtgcccgctcaagagaagaatttcaccaccgctccagccatctgccacgacggcaaagcccactttcctagagaaggcgtgttcgtgtccaacggcacccattggttcgtgacacagcggaacttctacgagccccagatcatcaccaccgacaacaccttcgtgtccggaagctgcgacgtcgtgatcggcattgtgaacaataccgtgtacgaccctctgcagcccgagctggacagcttcaaagaggaactggacaagtactttaagaaccacacaagccccgacgtggacctgggcgatatcagcggaatcaatgcctccgtcgtgaacatccagaaagagatcgaccggctgaacgaggtggccaagaatctgaacgagagcctgatcgacctgcaagaactggggaagtacgagcaaggcagcggctacattcccgaggctcctagagatggccaggcctacgttagaaaggacggcgagtgggtcctgctgagcacctttctgggaagatctctggaagtgctgtttcaaggccctggccaccaccatcatcaccatcaccacagcgcttggagccatcctcagttcgagaaaggcggaggatctggcggaggtggaagtggcggatctgcttggtcacacccacagtttgagaagtgatga

SEQ ID NO: 128 - DNA, 3777 bp, Artificial Sequence
  Description of Artificial Sequence: Synthetic polynucleotide
atgaagatcctgatcttcgccttcctggccaacctggctaaggcccaagaaggctgcggcatcatcagcagaaagccccagcctaagatggcccaggtgtccagctctagacggggcgtgtactacaacgacgacatcttcagatccgacgtgctgcatctgacccaggactacttcctgcctttcgacagcaacctgacacagtacttcagcctgaacgtggacagcgaccggtacacctacttcgacaaccccatcctggatttcggcgacggggtgtactttgccgccaccgagaagtccaacgtgatcagaggctggatcttcggcagcagcttcgacaataccacacagagcgccgtgatcgtgaacaacagcacccacatcatcatccgcgtgtgcaacttcaacctgtgcaaagaacccatgtacaccgtgtccagaggcacccagcagaacgcttgggtgtaccagagcgccttcaactgcacctacgacagagtggaaaagagcttccagctcgacaccacacctaagaccggcaatttcaaggacctgcgcgagtacgtgttcaagaaccgcgacggcttcctgtccgtgtatcagacctacaccgccgtgaacctgcctagaggactgcctacaggcttctccgtgctgaagcccatcctgaagctgcccttcggcatcaacatcaccagctacagagtcgtgatggccatgttcagccagaccaccagcaactttctgcctgagagcgccgcctactacgtgggcaatctgaagtacagcaccttcatgctgcggttcaacgagaacggcaccatcaccgatgccgtggactgcagccaaaatcctctggccgagctgaagtgcaccatcaagaacttcaatgtggacaagggcatctaccagacctccaacttccgggtgtcccctacacaagaagtgatcagattccccaatatcaccaacaggtgccccttcgacaaggtgttcaacgccacacggttccccaacgtgtacgcctgggagagaacaaagatcagcgactgcgtggccgactacaccgtgctgtacaactccaccagcttctccaccttcaagtgctacggcgtgtccccaagcaagctgatcgacctgtgcttcacctctgtgtacgccgacaccttcctgatccggtctagcgaagtgcgacaagtggcccctggcgaaacaggcgtgatcgccgattacaactacaagctgcccgacgacttcaccggctgtgtgatcgcctggaataccgccaagcacgacaccggcaactactactacagaagccacagaaagaccaagctcaagcccttcgagcgggacctgtccagcgacgatggaaatggcgtgtacaccctgagcacatacgacttcaaccccaatgtgcccgtggcctaccaggccacaagagtggtggtgctgtccttcgagctgctgaatgcccctgccacagtgtgtggccctaagctgtctaccgagctggtcaagaaccagtgcgtgaacttcaactttaacggcctgaaaggcaccggcgtgctgaccagcagcagcaagagattccagtccttccagcagttcggccgggacaccagcgatttcacagacagcgtcagagatccccagacactggaaatcctggacatcagcccttgcagcttcggcggagtgtctgtgatcacccctggcacaaatgccagctctgaagtggctgtgctgtaccaggacgtgaactgcaccgatgtgcccacagccatcagagccgatcagctgacaccagcttggcgggtgtactctactggtgtcaacgtgttccagacacaagccggctgtctgattggagccgaacacgtgaacgccagctacgagtgcgacatccctatcggagccggcatctgtgcctcttaccatacagccagcgtgctgagaagcaccggccagaaatccatcgtggcctataccatgtctctgggcgccgagaactctatcgcctacgccaacaactccattgctatccccaccaacttcagcatcagcgtgaccaccgaagtgatgcctgtgtccatggccaagaccgccgtggattgcaccatgtacatctgcggcgacagcctggaatgctccaacctgctgctgcagtacggcagcttctgcacccagctgaatagagccctgaccggaatcgccatcgagcaggacaagaacacccaagaggtgttcgcccaagtgaagcagatgtataagacccctgccatcaaggactttggcggcttcaacttctcccagatcctgcctgatcctagcaagcccaccaagcggagcttcatcgaggacctgctgttcaacaaagtgaccctggccgacgccggctttatgaagcagtatggcgattgcctcggcgacgtgtcagccagggatctgatttgcgcccagaagttcaacggactgaccgtgctgcctcctctgctgaccgatgagatggtggccgcctatacagccgcactggtgtctggtactgccaccgccggatggacatttggagctggtgctgccctgcagatccccttcgctatgcagatggcctacagattcaatggcatcggagtgacccagaacgtgctgtatgagaaccagaagctgattgccaaccagttcaacagcgccatcggcaagatccaagagagcctgagcagcacagcatctgccctgggaaagctgcaggacgtggtcaaccagaatgcccaggctctgaacaccctggtcaagcagctgtccagcaatttcggcgccatcagctctgtgctgaacgacatcctgagccggctggaccctcctgaagccgaggtgcagatcgacagactgatcaccggtagactgcagagcctgcagacctacgtgacccagcagctgatcagagctgccgagattagagccagcgccaatctggccgccaccaagatgtctgagtgtgtgctgggccagagcaagagagtggacttttgcggcaagggctaccacctgatgagcttccctcagtctgctcctcacggcgtggtgtttctgcacgtgacatacgtgcccagccaagagaagaatttcaccaccgctccagccatctgccacgagggcaaagcctactttcccagagaaggcgtgttcgtgtccaacggcacctcctggttcatcacccagcggaacttctactctccccagctgattaccaccgacaacaccttcgtgtccggcaactgcgacgtcgtgatcggaatcatcaacaataccgtgtacgaccctctgcagcccgagctggactccttcaaagaggaactggataagtacttcaagaatcacacaagccccgacgtggacctgggcgatatctctggcatcaatgcctccgtcgtgaacatccagaaagagatcgaccggctgaacgaggtggccaagaacctgaacgagtccctgattgacctgcaagagctgggcaaatacgagcaaggcagcggctacatccccgaggctcctagagatggacaggcctacgtcagaaaggacggcgaatgggtgctgctgagcacctttctgggcagatctctggaagtgctgtttcaaggccctggccaccaccatcaccatcatcaccacagcgcttggagccatcctcagttcgagaaaggcggaggatctggcggaggtggaagtggtggatctgcttggtcacacccacagtttgagaagtgatga

SEQ ID NO: 129 - DNA, 4119 bp, Artificial Sequence
  Description of Artificial Sequence: Synthetic polynucleotide
atgatccactccgtgtttctgctgatgttcctgctgacccctaccgagagctatgtggacgtgggccccgattctgtgaagtccgcctgcatcgaagtggacatccagcagacctttttcgacaagacctggcctcggcctatcgacgtgtccaaggccgacggcatcatctaccctcaaggccggacctacagcaacatcaccattacctaccaggggctgttcccctaccaaggcgatcacggcgatatgtacgtgtactctgccggacacgccaccggcaccacacctcagaaactgttcgtggccaactacagccaggacgtgaagcagttcgccaacggctttgttgtgcggattggcgccgctgccaatagcacaggcacagtgatcatcagccctagcaccagcgccaccatccggaagatctaccctgcctttatgctgggcagcagcgtgggcaatttcagcgacggcaagatgggcagattcttcaatcacaccctggtgctgctgcctgatggctgtggaacactgctgagagccttctactgcatcctggaacctcggagcggcaatcactgtcctgccggcaatagctacaccagcttcgccacctatcacacccctgccaccgattgctccgacggcaactacaacagaaacgccagcctgaacagcttcaaagagtacttcaacctgcggaactgcaccttcatgtacacctacaatatcaccgaggacgagatcctcgagtggttcggcatcacacagacagctcagggcgtgcacctgttcagcagcagatacgtggacctgtacggcggcaacatgttccagtttgccacactgcccgtgtacgacaccatcaagtactacagcatcatccctcacagcatccggtccatccagagcgacagaaaagcctgggccgccttctacgtgtacaagctgcagcctctgaccttcctgctggactttagcgtggacggctacatcagacgggccatcgactgcggcttcaacgatctgtctcagctgcactgctcctacgagagcttcgacgtggaaagcggcgtgtacagcgtgtccagctttgaggccaagcctagcggctctgtggtggaacaagctgaaggcgtggaatgcgacttcagccctctgctgtctggcacacctcctcaggtgtacaacttcaagcggctggtgttcaccaactgcaattacaacctgaccaagctgctgagcctgttctccgtgaacgacttcacctgtagccagatcagccctgccgccattgccagcaactgttacagcagcctgatcctggactacttcagctaccctctgagcatgaagtccgatctgagcgtgtcctccgccggaccaatcagccagttcaactacaagcagtccttcagcaaccctacctgcctgattctggccaccgtgcctcacaatctgaccaccatcaccaagcctctgaagtacagctacatcaacaagtgcagcagactgctgagcgacgacagaaccgaagtgccccagctggtcaacgccaaccagtacagcccttgcgtgtccatcgtgcctagcaccgtttgggaggacggcgactactatcggaagcagctgtctcctctggaaggcggaggatggctggtggcctctggatctacagtggccatgacagagcagctgcagatgggctttggcatcaccgtgcagtacggcaccgacaccaatagcgtgtgccctaagctggaattcgccaatgacaccaagatcgccagccagctgggcaactgcgtggaatactctctctacggcgttagcggcagaggcgtgttccagaattgcaccgccgtgggcgtccgccagcagagatttgtgtacgacgcctaccagaacctcgtgggctactacagcgacgacggcaattactactgcctgcgggcctgtgtgtccgtgcctgtgtctgtgatctacgacaaagagacaaagacccacgccacactgttcggcagcgtggcctgtgaacacatcagctccaccatgagccagtactccaggtccaccagatccatgctgaagcggcgggatagcacatacggccctctgcagacacctgtgggatgtgtgctgggcctcgtgaacagctccctgtttgtggaagattgcaagctgcccctgggccagtctctgtgtgctctgccagatacaccctccacactgacaccagcctctgtgggatctgtccccggcgaaatgaggctggcctctatcgcctttaatcaccccatccaggtggaccagctgaactccagctacttcaagctgagcatccccaccaacttcagcttcggcgtgacccaagagtacatccagaccacaatccagaaagtgaccgtggactgcaagcagtacgtgtgcaacggcttccagaagtgcgagcagctcctgagagagtacggccagttctgcagcaagatcaatcaggccctgcacggcgccaacctgagacaggatgatagcgtgcggaacctgttcgcctccgtgaagtcctctcagagcagccctatcatccctggcttcggcggcgactttaatctgaccctgctggaacctgtgtccatcagcaccggctccagaagcgccagatctgccattgaggacctgctgttcgacaaagtgaccattgccgatcctggctacatgcagggctacgacgattgcatgcagcagggacctgccagcgccagggatctgatttgtgcccagtatgtggccggctacaaggtgctgcctcctctgatggacgtgaacatggaagccgcctacacctctagcctgctgggatctattgctggcgttggctggacagccggcctgtctagctttgccgctattcccttcgctcagagcatcttctaccggctgaatggcgtcgggatcacccagcaggttctgagcgagaaccagaagctgatcgccaacaagttcaaccaggctctgggcgccatgcagaccggctttaccacaacaaacgaggcctttcagaaagtgcaggacgccgtgaacaacaacgcccaggcactgagcaaactggccagcgagctgagcaataccttcggcgccatctctgccagcatcggcgacatcatccagcgactggaccctccagaacaggacgcccagatcgacagactgatcaacggcagactgaccacactgaacgccttcgtggcccagcagctcgtcagaagtgaaagcgctgcactgtctgctcagctggccaaggacaaagtcaacgagtgcgtgaaggcccagagcaagagatccggcttttgtggccagggcacccacatcgtgtccttcgtggtcaatgcccctaacggcctgtactttatgcacgtgggctattaccccagcaaccacatcgaggtggtgtccgcctacggactgtgtgacgccgccaatcctaccaactgtatcgcccctgtgaacggctacttcatcaagaccaacaacacccggatcgtggacgagtggtcttacaccggcagcagcttttacgcccctgagcctatcacctctctgaacaccaaatacgtggcccctcaagtgacataccagaacatctccaccaacctgcctccacctctgctgggcaattccaccggcatcgatttccaggacgagctggacgagttcttcaagaacgtgtccaccagcattcccaacttcggcagcctgacacagatcaacaccacactgctggacctgacctacgagatgctgtccctgcagcaggtcgtgaaagccctgaacgagagctacatcgacctgaaagagctggggaactacacctacggcagcggctatatccccgaggctcctagagatggccaggcctatgttcggaaggatggcgagtgggtcctgctgagcacattcctgggcagatctctggaagtgctgtttcaaggccctgggcaccatcatcaccaccaccatcatagcgcttggagccatccacagttcgagaaaggtggtggatctggcggaggcggttctggcggatctgcttggtcacaccctcagtttgagaagtgatga

SEQ ID NO: 130 - DNA, 4080 bp, Artificial Sequence
  Description of Artificial Sequence: Synthetic polynucleotide
atgtttctgatcctgctgatctccctgcctaccgcctttgccgtgatcggcgatctgaagtgcaccagcgacaacatcaacgacaaggacacaggccctccacctatcagcaccgacaccgtggatgtgacaaatggcctgggcacctactacgtgctggaccgggtgtacctgaacaccacactgtttctgaacggctactaccccaccagcggcagcacctacagaaatatggccctgaagggcagcgtgctgctgagcagactgtggttcaagcctccattcctgagcgacttcatcaacggcatcttcgccaaagtgaagaacaccaaagtgatcaaggaccgcgtgatgtacagcgagttccccgccatcacaatcggctccaccttcgtgaacaccagctacagcgtggtggtgcagcccagaaccatcaacagcacccaggacggcgacaacaagctgcagggactgctggaagtgtccgtgtgccagtacaacatgtgcgagtaccctcagaccatctgtcaccccaacctgggcaaccaccggaaagaactgtggcacctggataccggcgtggtgtcctgcctgtacaagcggaacttcacctacgacgtgaacgccgactacctgtacttccacttctaccaagaaggcggcaccttctacgcctacttcaccgatacaggcgtcgtgaccaagttcctgttcaacgtgtacctcggcatggccctgtctcactactatgtgatgcccctgacctgcaacagcaagctgaccctggaatactgggtcacccctctgaccagcagacagtacctgctggccttcaaccaggatggcatcatcttcaacgccgtggactgcatgtccgacttcatgagcgagatcaagtgcaagacccagtctatcgcccctccaaccggcgtgtacgagctgaatggctacaccgtgcagcctatcgccgacgtgtacagacggaagcccaacctgcctaactgcaacatcgaggcctggctgaacgacaagagcgtgccctctccactgaactgggagagaaagaccttcagcaactgcaacttcaacatgagcagcctgatgagcttcatccaggccgacagcttcacctgtaacaacatcgacgccgccaagatctacggcatgtgcttcagcagcatcaccatcgacaagttcgctatccccaacggccggaaggttgacctgcagctgggcaatctgggctacctgcagagcttcaactaccggatcgataccaccgccaccagctgccagctgtactacaatctgcctgccgccaatgtgtctgtgtcccggttcaatcccagcacctggaacaagagattcggcttcatcgaggacagcgtgttcaagccaagacctgccggcgtgctgaccaaccacgatgtggtgtatgcccagcactgcttcaaggcccctaagaacttctgcccctgcaagctgaacggcagctgtgttggatctggccctggcaagaacaatggcatcggcacatgtcctgccggcaccaactacctgacctgtgacaatctgtgcacccctgatcctatcaccttcaccggcacctacaagtgcccacagaccaagtctctcgtcggcatcggcgagcactgttctggactggccgtgaagtccgattactgcggcggcaatagctgcacctgtagacctcaggcctttctcggctggagcgccgattcttgtctgcaaggcgacaagtgcaacatctttgccaacttcatcctgcacgatgtgaacagcggcctgacatgcagcaccgatctgcagaaggccaacaccgacatcatcctgggcgtgtgcgtgaactacgacctgtatggcatcctcggccagggcatctttgtggaagtgaacgccacctactataatagctggcagaacctgctgtacgacagcaacggcaacctgtacggcttccgggactacatcaccaaccggaccttcatgatccggtcctgctacagcggaagagtgtccgccgcctttcacgccaatagctctgaacccgctctgctgttccgcaacatcaagtgtaactacgtgttcaacaacagcctgaccagacagctgcagcccatcaactacttcgacagctacctgggctgcgtggtcaacgcctacaatagcacagccatcagcgtgcagacctgcgatctgacagtcggcagcggctactgtgtggactacagcaagaatggcggaagcggcggagccatcaccaccggctacagattcaccaacttcgagcccttcaccgtgaactccgtgaacgacagcctggaacctgtcggcggcctgtacgagatccagattcctagcgagtttaccatcggcaacatggtcgagttcatccagacaagcagccccaaagtgaccatcgactgcgccgctttcgtgtgcggagattatgccgcctgcaagagccagctggtcgagtacggcagcttctgcgacaatattaacgccatcctgaccgaagtgaatgagctgctggacaccacacagctccaggtggccaactctctgatgaacggcgtgaccctgagcaccaagctgaaggacggcgtgaacttcaacgtggacgacatcaacttcagccccgtgctgggctgtctgggcagcgaatgttctaaggccagctccagatccgccatcgaggatctgctgtttgacaaagtgaaactgagcgacgtgggcttcgtggaagcctacaacaattgcacaggcggagccgagatccgggacctgatttgtgtgcagagctacaagggcatcaaagtgctgcctccactgctgtccgagaaccagatcagcggctatacactggccgctaccagcgcctctctgttccctccatggacagctgctgctggcgtgcccttctacctgaacgtgcagtacagaatcaacggcctgggagtgaccatggacgtgctgagccagaaccagaagctgatcgccaacgccttcaacaacgccctgtacgccatccaagagggcttcgatgccaccaatagcgccctggttaagattcaggccgtggtcaatgccaacgccgaggctctgaacaacctcctgcagcagctctctaacagattcggcgccatctccgccagtctgcaagagatcctgtccagactggaccctcctgaggctgaggcccagatcgacagactgatcaatggcagactgacagccctgaacgcctacgtcagccagcagctgagcgatagcaccctcgtgaagtttagcgccgctcaggccatggaaaaagtgaacgagtgtgtgaagtcccagagcagccggatcaacttctgcggcaatggcaaccacatcatcagcctggtgcagaacgccccttacggcctgtatttcatccacttcagctacgtgcccaccaaatacgtgaccgccagagtgtctcccggcctgtgtattgctggcgacagaggaatcgcccctaagtccggctacttcgtgaatgtgaacaacacctggatgtacaccggctccggctattactaccccgagccaatcaccgagaacaacgtggtggtcatgagcacctgtgccgtgaattacacaaaggccccatacgtgatgctgaacactagcatccccaatctgcccgacttcaaagaggaactggaccagtggtttaagaatcagaccagcgtggccccagacctgagcctggactatatcaacgtgaccttcctggatctgcaggtcgagatgaaccggctgcaagaggccatcaaggtgctgaatggaagcggctacatccccgaggctcctagagatggacaggcctacgttcggaaggatggcgaatgggtgctgctgtctacctttctgggcagatccctggaagtgctgttccaaggacctggccaccaccatcaccatcatcaccacagcgcttggagccatcctcagtttgagaaaggcggaggatctggcggcggtggaagcggtggatctgcttggtcccatccacagttcgaaaagtgatga

SEQ ID NO: 131 - DNA, 4089 bp, Artificial Sequence
  Description of Artificial Sequence: Synthetic polynucleotide
atgctgctgatcatcttcatcctgcctaccacactggccgtgatcggcgacttcaactgcaccaacttcgccatcaacgacctgaacaccaccgtgcctcggatcagcgagtatgtggtggatgtgtcttacggcctgggcacctactacatcctggaccgggtgtacctgaataccacaatcctgttcaccggctacttccccaagagcggcgccaacttcagagatctgagcctgaagggcaccacctacctgagcaccctgtggtatcagaagcccttcctgagcgatttcaacaacggcatcttcagccgcgtgaagaacaccaagctgtacgtgaacaagaccctgtacagcgagttcagcaccatcgtgatcggaagcgtgttcatcaacaacagctacacaatcgtggtgcagccccacaacggcgtgctggaaattaccgcctgccagtacaccatgtgcgagtaccctcacaccatctgcaagagcaagggcagcagcagaaacgagagctggcacttcgacaagagcgagcccctgtgcctgttcaagaagaacttcacctacaacgtgtccaccgactggctgtacttccacttctaccaagagagaggcaccttctacgcctactacgccgacagcggaatgcccaccacctttctgttcagcctgtacctgggcacactgctgagccactactacgtgctgcccctgacctgcaatgccatcagctccaacaccgacaacgagacactgcagtactgggtcacccctctgagcaagagacagtacctgctgaagttcgacaaccggggcgtgatcaccaacgccgtggactgtagcagcagcttcttcagcgagatccagtgcaagaccaagagcctgctgcctaacaccggcgtgtacgatctgagcggctttaccgtgaagcctgtggccaccgtgcacagaagaatccccgatctgcccgactgcgacatcgacaagtggctgaacaacttcaacgtgccctctccactgaactgggagagaaagatcttcagcaactgcaacttcaatctcagcaccctgctgcggctggtgcacaccgatagcttcagctgcaacaatttcgacgagagcaagatctacggcagctgcttcaagagcatcgtgctggacaagttcgctatccccaacagcagaagaagcgacctgcagctgggcagctctggctttctgcagagcagcaactacaagatcgacaccaccagctccagctgtcagctgtactacagcctgcctgccatcaatgtgacgatcaacaactacaaccccagcagctggaaccgcagatacggcttcaacaactttaacctgagcagccacagcgtggtgtacagccggtactgcttcagcgtgaacaacacattctgcccctgcgccaagcctagctttgccagctcctgcaagtcccacaagcctccatctgccagctgtcccatcggcaccaactacagaagctgcgagagcaccacagtgctggaccacaccgattggtgcagatgcagctgcctgcctgatcctatcaccgcctacgatcccagatcctgcagccagaagaaaagcctcgttggcgtgggagagcactgtgccggattcggagtggacgaagagaagtgcggagtgctggatggcagctacaatgtgtcctgcctgtgcagcaccgacgcctttctcggctggtcttacgatacctgcgtgtccaacaaccggtgcaacatcttctccaacttcatcctcaacgggatcaacagcggcaccacatgcagcaacgatctgctgcagcccaataccgaggtgttcaccgatgtgtgcgtggactacgacctgtacggcatcacaggccagggaatcttcaaagaggtgtccgccgtctactacaactcctggcagaacctgctgtacgacagcaacggcaacatcatcggcttcaaggacttcgtgaccaacaagacctacaatatcttcccctgctacgccggcagagtgtctgccgcctttcaccagaatgccagcagtctggccctgctgtatcggaacctgaagtgcagctatgtcctgaacaacatcagcctgaccacacagccctacttcgacagctatctgggctgcgtgttcaacgccgacaacctgaccgattacagcgtgtccagctgcgccctgagaatgggcagcggcttctgtgtggactacaacagccctagcagctctagctctggcggctctggctctagcatcagcgccagctacagattcgtgaccttcgagccctttaacgtgtccttcgtgaacgacagcatcgagtctgtcggcggcctgtatgagatcaagatccccaccaatttcaccatcgtcggccaagaggaattcatccagacaaacagccccaaagtgaccatcgactgcagcctgttcgtgtgcagcaattacgccgcctgtcacgacctgctgagcgagtacggcaccttttgcgacaacatcaacagcatcctggatgaagtgaatggcctgctggacacaacacagctgcacgtggccgacacactgatgcagggcgttaccctgtccagcaatctgaacacaaacctgcacttcgatgtggacaatatcaatttcaagtccctcgtgggctgtctgggccctcactgtggatctagctccagaagctttttcgaggacctcctgttcgacaaagtgaagctgagcgacgtgggcttcgtggaagcctacaacaattgcacaggcggctccgagatccgggatctgctgtgtgtgcagagcttcaatggcatcaaggtgctgcctccaatcctgtccgagagccagatcagcggctacacaacagccgctacagtggccgccatgtttccaccttggagtgccgctgccggcattccctttagcctgaacgtgcagtacagaatcaatggcctgggcgtgaccatggacgtgctgaacaagaaccagaagctgatcgccaccgccttcaacaatgctctgctgagcatccagaacggcttctccgccacaaatagcgccctggccaagatccagagcgtggtcaactctaacgctcaggccctgaacagcctcctgcagcagctgttcaacaagttcggcgccatcagcagtagcctgcaagagatcctgagcagactggaccctcctgaggctcaggtgcagatcgacagactgatcaacggcagactgacagccctgaatgcctacgtgtcacagcagctcagcgacatctccctggtcaagtttggagccgctctggccatggaaaaagtgaacgagtgcgtgaagtctcagagccccagaatcaacttctgcggcaatggcaaccacatcctgagcctggtgcagaacgccccttacggactgctgttcatgcactttagctacaagcccatctccttcaagaccgtgctggtgtccccaggcctgtgcattagcggagatgtgggaatcgcccctaagcagggctacttcatcaagcacaacgaccactggatgtttaccggcagcagctactactaccccgagcctatcagcgacaagaacgtcgtgttcatgaatacctgctccgtgaacttcacaaaggcccctctggtgtatctgaatcacagcgtgcccaagctgtccgacttcgagtctgagctgtctcactggttcaagaatcagaccagcattgcccctaatctgaccctgaacctgcatacaatcaacgccaccttcctggacctgtactacgagatgaacctgatccaagagagcatcaagtctctgaacggctccggctacatcccagaggctcctagagatggccaggcctacgtcagaaaggatggcgaatgggtgctgctgtctacctttctgggccgctctctggaagtgctgtttcaaggccctggacaccatcaccatcatcaccaccacagcgcttggagccatcctcagttcgaaaaaggcggcggatctggcggcggtggaagcggaggatctgcttggtcacacccacagttcgagaagtgatga

SEQ ID NO: 132 - DNA, 4062 bp, Artificial Sequence
  Description of Artificial Sequence: Synthetic polynucleotide
atgctgctgatcatcttcatcctgcctaccacactggccgtgatcggcgacttcaactgcaccaacagcttcatcaacgactacaacaagacgatccccaggatcagcgaggacgtggtggatgtgtctctcggcctgggcacctactacgtgctgaacagagtgtacctgaacaccacactgctgttcaccggctacttccctaagagcggcgccaacttcagagatctggccctgaagggcagcatctacctgagcaccctgtggtacaagcctccattcctgagcgatttcaacaacggcatcttcagcaaagtgaagaacaccaagctgtacgtgaacaacaccctgtacagcgagttcagcaccatcgtgatcggaagcgtgttcgtgaacaccagctacacaatcgtggtgcagccccacaatggcatcctggaaatcaccgcctgccagtacaccatgtgcgagtaccctcacaccgtgtgcaagagcaagggctccatcagaaacgagagctggcacatcgacagcagcgagcctctgtgcctgttcaagaagaacttcacctacaacgtgtccgccgactggctgtacttccacttctatcaagagcggggcgtgttctacgcctactacgccgatgtgggaatgcccaccacctttctgttctccctgtacctgggcacaatcctgagccactactatgtgatgcccctgacctgcaacgccatcagctccaacaccgacaacgagacactggaatactgggtcacccctctgagcagacggcagtacctgctgaacttcgatgagcacggcgtgatcaccaacgccgtggattgcagcagcagcttcctgtccgagatccagtgcaagacccagagcttcgcccctaacaccggcgtgtacgatctgagcggctttaccgtgaagcctgtggccaccgtgtacagaagaatccccaacctgcctgactgcgacatcgacaactggctgaacaatgtgtccgtgccttctccactgaactgggagagaaggatcttctccaactgcaacttcaacctgtctaccctgctgcggctggtgcacgtggacagcttcagctgcaacaacctggacaagtccaagatcttcggcagctgcttcaacagcatcaccgtggacaagttcgctatccccaacagaaggcgggacgatctgcagctgggcagctctggatttctgcagagcagcaactacaagatcgacatcagcagctccagctgccagctgtactacagcctgcctctggtcaacgtgaccatcaacaacttcaatcccagcagctggaatcggagatacggcttcggctccttcaatctgagcagctacgacgtggtgtactccgaccactgcttcagcgtgaacagcgacttctgcccttgcgccgatcctagcgtggtcaatagctgcgccaagtctaagcctcctagcgccatttgtcctgccggcaccaagtacagacactgcgacctggacacaaccctgtatgtgaagaactggtgccggtgcagctgcctgcctgatcctatcagcacatacagccccaacacctgtcctcagaaaaaggtggtcgtcggcatcggcgagcactgtcctggactgggcatcaacgaagagaagtgcggcacccagctgaaccacagcagctgtttctgtagccccgatgcctttctcggctggtccttcgatagctgcatcagcaacaaccggtgcaacatctttagcaacttcatcttcaacgggatcaacagcggcaccacctgtagcaacgacctgctgtactccaataccgagatcagcacaggcgtgtgtgtgaactacgacctgtacggcatcaccggccagggaatcttcaaagaggtgtccgctgcctactataacaactggcagaatctgctgtacgacagcaacggcaacattatcggcttcaaggacttcctgaccaacaagacctacaccatcctgccatgctacagcggcagagtgtctgccgccttctaccagaatagcagcagccccgcactgctgtaccggaacctgaagtgcagctatgtcctgaacaacatcagctttatcagccagccgttctacttcgacagctacctgggctgcgtgctgaatgccgtgaacctgacaagctacagcgtgtccagctgcgatctgagaatgggcagcggcttctgcatcgactacgccttgccttcttctggcggctctggcagcggaatcagcagcccttacagattcgtgaccttcgagccctttaacgtgtccttcgtgaacgacagcgtggaaaccgtcggcggcctgttcgagattcagatccccaccaacttcacaatcgccggccacgaggaattcatccagacaagcagccccaaagtgaccatcgactgctccgccttcgtgtgcagcaattacgccgcctgtcacgatctgctgagcgagtacggcaccttctgcgacaacatcaactccatcctgaacgaagtgaatgacctgctggacattacccagctccaggtggccaacgctctgatgcaaggcgtgaccctgtccagcaacctgaataccaacctgcacagcgacgtggacaacatcgacttcaagagcctgctgggctgtctgggctctcagtgtggcagcagctctagatccctgctggaagatctgctgtttaacaaagtcaagctgagcgacgtcggcttcgtggaagcctacaacaattgcacaggcggcagcgagatccgggatctgctttgcgtgcagagctttaacggcatcaaggtgctgccacctatcctgtctgagacacagatcagcggctacaccacagccgctacagtggccgctatgttcccaccttggagtgccgctgctggcgtgccctttagtctgaacgtgcagtaccggatcaatggcctgggcgtgaccatggatgtgctcaacaagaaccagaagctgattgccaacgccttcaacaaggccctgctgagcatccagaatggcttcaccgccaccaatagcgccctggccaagatccagagcgtcgtgaatgccaatgctcaggccctgaacagcctcctgcagcaactgttcaacaagttcggcgccatctccagcagcctgcaagagatcctgagcaggctggacaatctggaagctcaggtgcagatcgaccggctgatcaacggcagactgacagccctgaatgcctacgtgtcccagcaactgagcgacatcaccctgattaaggctggcgcctccagagccatcgagaaagtgaacgagtgcgtgaagtctcagagccctcggatcaacttctgcggcaatggcaaccacatcctgtctctggtgcagaacgccccttacggcctcctgttcatccacttcagctacaagcccaccagcttcaagacagtgctggtgtcccctggcctgtgtctgtctggcgatagaggcattgcccctaagcagggctacttcatcaagcagaacgatagctggatgtttaccggcagctcctactactaccccgagcctatcagcgacaagaacgtggtgtttatgaactcctgctccgtgaatttcaccaaggctcccttcatctacctcaacaatagcatccctaacctgagcgacttcgaggccgagctgagcctgtggtttaagaaccacacatctatcgccccaaacctgaccttcaactcccacatcaacgccacatttctggacctgtactacgagatgaacgtgatccaagagagcatcaagtccctgaacggctccggctacatccccgaggctcctagagatggacaggcctacgtcagaaaggacggcgaatgggtgctgctgtctaccttcctggaagtgctgtttcaaggccccggacaccaccatcatcaccatcaccacagcgcttggagccatcctcagtttgagaaaggcggcggatctggcggaggtggaagcggaggatctgcatggtcacaccctcagttcgaaaagtgatga

SEQ ID NO: 133 - DNA, 3576 bp, Artificial Sequence
  Description of Artificial Sequence: Synthetic polynucleotide
atgtttgtgctgctggtggcctacgctctgctgcacattgctggctgccagaccaccaacggcctgaacacaagctacagcgtgtgcaatggctgcgtgggctacagcgagaatgtgttcgctgtggaaagcggcggctacatccctagcgacttcgccttcaacaactggttcctgctgaccaacaccagctccgtggtggatggcgtcgtgcggtcttttcaacccctgctgctgaactgcctttggagcgtgtccggcctgagattcaccaccggcttcgtgtacttcaacggcaccggaagaggcgactgcaagggctttagctccgatgtgctgagcgacgtgatccggtacaacctgaacttcgaggaaaacctgcggagaggcaccatcctgttcaagaccagctatggcgtggtggtgttctactgcaccaacaacaccctggtgtccggcgacgcccacattccttttggaaccgtgctgggcaacttctactgcttcgtgaataccaccatcggcaacgagacaaccagcgcctttgtgggagccctgcctaagaccgtgcgcgagtttgtgatcagcagaaccggccacttctacatcaacggctacagatacttcaccctgggcaacgtggaagccgtgaacttcaatgtgaccaccgccgagactaccgacttctgcacagtggccctggccagctatgctgacgtgctggtcaatgtgtcccagacctctatcgccaacatcatctactgcaacagcgtgatcaaccggctgagatgcgaccagctgagcttcgatgtgcccgacggcttctacagcacaagccctatccagagcgtggaactgcccgtgtccatcgtgtctctgcctgtgtaccacaagcacaccttcatcgtgctgtacgtggacttcaagccccagtctggcggcggaaagtgcttcaattgctatcctgccggcgtgaacatcaccctggccaatttcaacgagactaagggccctctgtgcgtggacaccagccacttcaccaccaaatacgtggccgtgtacgccaatgttggacgttggagcgccagcatcaacaccggcaactgccctttcagcttcggcaaagtgaacaacttcgtgaagttcggctccgtgtgcttcagcctgaaggatatccctggcggctgcgccatgcctatcgtggccaattgggcctacagcaagtactacacaatcggcagcctgtatgtgtcttggagcgacggcgacggaatcacaggtgtccctcaacctgtggaaggcgtgtccagcttcatgaacgtgaccctggacaagtgcaccaagtacaacatctacgatgtgtctggcgtgggcgtgatcagagtgtccaacgacaccttcctgaacggcatcacctacaccagcaccagcggcaatctgctgggcttcaaggatgtgaccaagggcaccatctacagcatcaccccttgcaaccctccagatcagctggtggtgtatcagcaggctgttgtgggcgccatgctgtccgagaactttaccagctacggcttcagcaacgtggtcgagctgcccaagttcttctacgcctccaatggcacctacaactgcaccgatgccgtgctgacctacagctcctttggcgtgtgtgccgacggcagcattattgccgtgcagcccagaaacgtgtcctacgattccgtgtccgccatcgtgaccgccaacctgagcatcccaagcaactggaccacaagcgtgcaggtcgagtacctgcagatcaccagcacacccatcgtggtggactgcagcacctacgtgtgcaacggcaacgtccgctgtgttgagctgctgaagcagtacacctccgcctgcaagaccatcgaggacgccctgagaaatagcgccaggctggaatctgccgacgtgtccgagatgctgaccttcgacaagaaggcctttacactggctaatgtgtctagcttcggcgactacaacctgtctagcgtgatccccagcctgcctacaagcggctctagagtggctggaagaagcgccattgaggacatcctgtttagcaagctcgtgaccagcggcctgggaaccgtggatgccgattacaagaagtgtaccaagggcctgtctatcgccgacctggcctgtgctcagtactacaatggcatcatggtgctgcccggcgtggccgatgcagaaagaatggccatgtacaccggaagcctgatcggcggaattgccctcggaggactgacaagcgccgtgtctatcccttttagcctggccatccaggccagactgaactacgtggccctgcagacagacgtgctgcaagagaaccagaagatcctggccgccagctttaacaaggccatgaccaacatcgtggacgccttcactggcgtgaacgatgccatcacacagaccagccaggctctgcagactgtggctacagccctgaacaagatccaggacgtggtcaaccagcagggcaactccctgaatcacctgacaagccagctgcggcagaacttccaggccatcagctctagcattcaggccatctacgaccggctggaccctcctcaggctgaccagcaagtggacagactgatcaccggcagactggccgctctgaacgtgttcgtgtctcacaccctgacaaagtacaccgaagtgcgggcctctagacagctggctcagcagaaagtgaacgagtgtgtgaagtcccagagcaagagatacggcttctgcggcaacggaacccacatcttcagcatcgtgaacgctgcccctgaaggcctggtgtttctgcacacagtgctgctgcccacacagtacaaggacgtcgaagcttggagcggcctgtgtgtggatggcaccaatggctacgtgctgagacagcccaatctggccctgtacaaagagggcaactactacagaatcaccagccggatcatgttcgagcctagaatccccaccatggccgacttcgtgcagatcgagaactgcaacgtgaccttcgtgaacattagcagaagcgagctgcagacaatcgtgcccgagtacatcgacgtgaacaagaccctgcaagagctgagctacaagctgcctaactacaccgtgcctgacctggtggtggaacagtacaaccagaccatcctgaacctgaccagcgagatcagcaccctggaaaacaagagcgccgagctgaactacacagtgcagaagctccagacactgatcgacaacatcaacagcacactggtggacctgaaatggctgaacagagtggaaaccggcagcggctatatccccgaggctcctagagatggacaggcctacgtcagaaaggacggcgaatgggtgctgctgagcacctttctgggcagatccctggaagtgctgtttcaaggcccaggccaccaccatcatcaccatcaccacagcgcttggagccatcctcagttcgagaaaggcggaggatctggcggaggcggttctggtggatctgcttggagtcacccacagtttgaaaagtgatga

SEQ ID NO: 134 - DNA, 4119 bp, Artificial Sequence
  Description of Artificial Sequence: Synthetic polynucleotide
atgaagctgtttctgatcctgctggtgctgcccctggccagctgcttcttcacctgtaacagcaacgccaacctgagcatgctgcagctgggcgtgccagacaatagcagcaccatcgtgacaggcctgctgcctacacactggttctgcgccaatcagagcaccagcgtgtacagcgccaacggcttcttctacatcgacgtgggcaaccacagaagcgccttcgcactgcacaccggctactacgatgccaaccagtactacatctacgtgaccaacgagatcggcctgaacgccagcgtgaccctgaagatctgcaagttcagccggaataccaccttcgactttctgagcaacgcctccagcagcttcgactgcatcgtgaacctgctgttcaccgagcagctgggagcccctctgggcatcacaatttctggcgaaacagtgcggctgcacctgtacaacgtgacccggaccttttatgtgccagccgcctacaagctgaccaagctgagcgtgaagtgctacttcaactacagctgcgtgttcagcgtggtcaatgccaccgtgaccgtgaacgtgaccacacacaatggccgggtcgtgaactacaccgtgtgcgacgattgcaacggctacaccgacaacatcttcagcgtgcagcaggacggcagaatccccaatggcttccccttcaacaactggttcctgctgaccaacggcagcaccctggttgatggcgtgtccagactgtaccagcctctgagactgacctgcctgtggcctgtgcctggactgaagtctagcaccggcttcgtgtacttcaacgccaccggcagcgacgtgaactgcaatggctaccagcacaacagcgtggtggacgtgatgcggtacaacctgaacttctccgccaacagcctggacaatctgaagtccggcgtgatcgtgttcaagaccctgcagtacgacgtgctgttctactgcagcaacagcagcagcggcgtgctggacaccaccattccttttggccctagcagccagccttactactgcttcatcaactccaccatcaacaccacacacgtgtccaccttcgtgggcatcctgcctccaaccgtgcgggaaattgtggtggctagaaccggccagttttacatcaacgggttcaagtacttcgacctgggcttcatcgaggccgtgaactttaatgtgaccaccgccagcgccaccgatttctggacagtggcctttgccacctttgtggacgtgctggtcaatgtgtccgccaccaacatccagaatctgctgtactgcgacagccccttcgagaagctgcagtgtgaacatctgcagttcggcctgcaagacggcttctactccgccaatttcctggacgacaacgtgctgcccgagacatatgtggccctgcctatctactatcagcacaccgacatcaatttcaccgccacagccagcttcggcggcagctgttacgtgtgcaaaccccaccaagtgaacatcagcctgaacggcaacacctccgtgtgtgtgcggaccagccacttcagcatccggtacatctacaacagagtgaagtctggcagccctggcgacagctcctggcacatctacctgaaaagcggcacatgccccttcagcttcagcaagctgaacaacttccagaagtttaagaccatctgcttcagcaccgtggaagtgcccggcagctgcaactttccactggaagccacctggcactacaccagctacacaatcgtgggcgccctgtatgtgacttggagcgagggcaatagcatcaccggcgtgccatatcctgtgtccggcatccgcgagttcagcaatctggtgctgaacaattgcaccaagtacaatatctacgactacgtcggcaccggcatcatcagaagcagcaaccagtctctggctggcggcatcacctacgtgtccaactctggcaatctgctgggctttaagaatgtgtccaccggcaatatcttcatcgtcaccccttgcaaccagcctgaccaggtggcagtgtaccagcagtctatcatcggcgccatgaccgccgtgaacgagagcagatatggcctgcagaacctgctccagctgcctaacttctactatgtgtccaatggcggcaacaactgcaccacagccgtgatgacctacagcaacttcggcatctgcgccgacggcagcctgattcctgtcagacctagaaacagcagcgacaacggcatcagcgccatcatcaccgccaatctgtctatccccagcaactggaccacaagcgtgcaggtcgagtacctgcagatcaccagcacacccatcgtggtcgattgcgccacctatgtgtgcaacggcaaccccagatgcaaaaacctgctgaaacagtacaccagcgcctgcaaaaccatcgaggacgccctgagactgtctgcccacctggaaacaaacgacgtgtcctccatgctgaccttcgacagcaatgccttcagcctggccaatgtgacctccttcggcgactacaacctgtcctctgtgctgcctcagggcaacatcggcagctctagaatcgccggaagaagcgccctggaagatctcctgttcagcaaggtcgtgacaagcggcctgggcacagtggacgtggactacaagagctgtaccaagggcctgtctatcgccgatctggcctgcgctcagtactataatggcatcatggtgctccccggcgtggccgatgctgaaagaatggccatgtacaccggaagcctgatcggcggaatggtgctcggaggactgacttctgccgccgctattccctttagcctggctctgcaggctagactgaactacgtggcactgcagaccgatgtgctgcaagagaaccagaagatcctggccgccagcttcaacaaggccatcaacaacatcgtggccagcttctccagcgtgaacgacgccattacacagaccgccgaggccatccacacagtgacaatcgccctgaacaagatccaggacgtcgtgaaccagcagggcagcgccctgaatcacctgacaagccagctgcggcacaactttcaggccatcagcaattccatccaggccatctacgaccggctggaccctccacaggctgaccagcaagtggacagactgatcaccggcagactggccgctctgaacgcctttgtgtcccaagtgctcaacaagtacaccgaagtgcggggctctagaaggctggcccagcaaaagatcaacgagtgcgtgaagtcccagagcaacagatacggcttctgcggcaacggcacccacatcttctctatcgtgaacagcgccccagacggactgctgttcctccatacagtgctgctgcccaccgattacaagaacgtgaaggcttggagcggcatctgtgtggacggcatctacggctatgtgctgagacagcccaacctggtgctgtactccgataacggggtgttcagagtgacctccagagtgatgttccagcctagactgcccgtgctgagcgacttcgtgcagatctacaactgtaacgtgaccttcgtcaacatcagcagagtggaactgcacactgtgatccccgactatgtggatgtgaacaagacactgcaagagttcgcccagaatctccccaaatacgtgaagcccaacttcgatctgacccctttcaacctgacctacctgaatctgagcagcgaactgaaacagctcgaggccaagaccgccagcctgtttcagacaacagttgagctgcagggcctgatcgaccagatcaactctacctacgtggacctgaagctgctcaacagattcgagaacggcagcggctacatccccgaggctcctagagatggacaggcctacgtcagaaaggacggcgaatgggtgctgctgagcacctttctgggcagatccctggaagtgctgtttcaaggccctggccaccaccatcaccatcatcatcacagcgcttggagccatcctcagttcgagaaaggcggaggatctggcggaggtggaagtggtggatctgcttggtcacacccacagtttgagaagtgatga

SEQ ID NO: 135 - DNA, 696 bp, Artificial Sequence
  Description of Artificial Sequence: Synthetic polynucleotide
atgggctggtcctgcatcatcctgtttctggtggccacagccacaggggtgcacgcttccttcttcgcccacaccactgtgaacatcaccatcgacctgggaatgaagagaagcggatacggccagcccatcgcctcccctctgtcaaacatcaccctgcctatgcaggataacaataccgatgtgtactgtatcagaagcaaccagttcagcatctacgtccacagcacctgcaagagcagcctgtgggacaacgtgtttaatcaagactgtacagatgtgctggaagctaccgccgtgataaagaccggtacatgtcctttttccttcgacaaactgaacaaccacctgacattcaacaagttttgcctgtccctgagccctgtcggcgctaattgtaagtttgacgtggccgctagaacccggactaacgagcaggttgtgcggagcctttatgtgatctacgaggaaggcgacaacatcgtgggtgttcctagtgataatagcggcctgcacgatctgtctctgcctgagacaggcggacttgaggtgctgtttcagggccctggccaccaccaccaccaccatcaccactctgcctggtctcaccctcagttcgagaaaggcggaggcagtggcggaggcggcagcggcggctcggcttggagccacccccagttcgaaaagtgataatga

SEQ ID NO: 136 - DNA, 4200 bp, Artificial Sequence
  Description of Artificial Sequence: Synthetic polynucleotide
atgaaactgctgttcgtggtgctggtggtgctgcctagcatctacggcgataactttccttgctcgaagttcctgaacagaacgatcggcaaccactggaacctgatcgagaacttcctgctcaactacagcattcggctgccaccgaactctgacgtggtgctgggagactacttccccaccgtacagccttggttcaattgcatccggaacaacaacaacagcctgtacgtgacaatggaaaatctgaaggccctgtactgggattacgccaccgaaaacatcacatctgaccacagacagcggctgcacgtggtggtgaagggcaaaccttacagcatcaccgtgaccactacccggaacttcgacgccgccgagggcgcaatcatctgcatctgcaagggctccccacctacaacaaccactggcaatctcgactgcaactggggctcagactgcagactgaatcacaagttccctatctgtcccagcaactcccaagcaaactgcggcaacatgctgtacggcctgcagtggtttacagacgaggtggtggcctatctgcatggcgccatttacagaatcagcttcgagaacaagtggttcggaacagttaccctgggtgatatgcgagccaccaccctgcaaaccgccggcgctctggttgatctgtggtggttcaaccccgtttacgacgtaacctactacagagtaaacaacaagaacggcaccaccatcgtgtctaattgcaccgaccagtgcgccagctacgttgacaacgtgttcacgacacagcctggcggactgatcccaagcgactttagcttcaacaactggttcctgctgaccaatagctctacagtcgtgtcgggcaagctggtgaccagacagccactggtggtgaactgtctgtggcccgtgcccagcttcaaggaagccgcttctaccttctgcttcgagggcgccggattcgatcagtgtaatggcgctgttctgaacaacaccgtggacgtgatccggttcaacctgaacttcaccgccgatgtgcagagcggaatgggagccacagtgttctccctgaataccaccggcggcgtgatcctggaaatcagctgctacaacgacatcgtgagcgaaagcagcttttacagctacggggacatccccttcggcatcacagacggccctcggtactgttacgtgctgtataatggcaccacactgaaatacctgggcactctgcctcctagcgtgaaagagatcgccatcagcaaatggggccacttctacatcaacggctacaattttttcagcacatttcctatcgactgcatttctttcaacctgaccaccggagccagcggcgcattctggaccattgcctacacctcttacaccgaggccctcgtccaggtggaaaacaccgccatcaaaaaggtgacatactgcaacagccatatcaacaacatcaagtgcagccagctgacagccaacctgcagaacggcttttaccctgtggcttcttctgaagtgggcctggtgaataaaagcgtagtgctgctgccttccttcttcgcccacaccactgtgaacatcaccatcgacctgggaatgaagagaagcggatacggccagcccatcgcctcccctctgtcaaacatcaccctgcctatgcaggataacaataccgatgtgtactgtatcagaagcaaccagttcagcatctacgtccacagcacctgcaagagcagcctgtgggacaacgtgtttaatcaagactgtacagatgtgctggaagctaccgccgtgataaagaccggtacatgtcctttttccttcgacaaactgaacaaccacctgacattcaacaagttttgcctgtccctgagccctgtcggcgctaattgtaagtttgacgtggccgctagaacccggactaacgagcaggttgtgcggagcctttatgtgatctacgaggaaggcgacaacatcgtgggtgttcctagtgataatagcggcctgcacgatctgtctgtgctgcacctggattcttgcaccgactataacatctatggcagaacaggcgtcggcgtcatcagacagacaaacagcacactgctgagtggactgtattacacaagcctgagcggcgacctgctgggcttcaagaacgtctctgatggagtgatctactctgtgaccccctgtgatgtgtccgcccaggccgccgtgatcgatggagccatcgtgggggcaatgaccagtatcaacagcgagctgctgggcctaacacactggacgaccacccctaacttctactactatagcatctacaactacaccaacgagagaaccagaggtaccgccatcgacagcaacgacgtggactgcgagcctatcattacgtactctaacatcggagtgtgcaagaacggcgccctggtgttcatcaacgtgacccatagcgacggagatgtgcagcctatcagcaccgggaacgtgaccatccctaccaacttcaccatcagcgtgcaggtcgagtacatccaggtgtacaccacccccgtgtccatcgactgcgccagatacgtgtgtaatggcaatcctcgctgcaacaagctgctgacacagtacgtgtcggcatgccagacaatcgagcaggccctggccatgggcgccagactggagaacatggaagtggacagcatgctttttgtgtctgaaaacgccctcaagctggcctccgtggaggccttcaacagcaccgagaacctggaccccatttacaaggaatggcctaatatcgggggctcttggctgggcggcctgaaggacatcctgcctagccacaacagcaaaagaaagtaccggagcgccatcgaggacctgctgtttgacaaggtggttacttccggactgggcaccgtggacgaggactataagcggtgtacaggcggctacgacatcgccgacctggtgtgcgcccagtactataacggtatcatggtgcttcccggagttgccaacgatgacaagatgacaatgtacacagcctcgctggctggaggtataacactgggagccctgggcggcggcgccgtggccattcccttcgccgtcgccgtgcaggcccggcttaactacgtggccctgcagaccgacgtactgaacaagaatcagcagatcctggccaacgctttcaaccaggcaatcggaaatatcacacaggccttcggcaaggtgaacgacgctatccaccagactagcaagggcctggccaccgttgccaaggtgctggccaaggtccaggacgtggtcaacacccagggacaggccctgtctcacctcaccgtgcaactgcagaacaactttcaggccatcagcagctccatcagcgacatctacaaccgcctggaccctccttctgctgatgcgcaagtggacagacttatcaccggcaggctgacagccctgaacgcgtttgtctcccaaaccctcacaagacaggcagaagtgcgggccagcagacagttagccaaggataaggtgaatgagtgcgtgcggagccagagccagagattcggcttctgcgggaatggcacacacctgttcagcctggctaatgccgcccctaatggcatgattttcttccacacagttctgctgcctaccgcctaccagaccgtgaccgcctgtagcggcatctgcgccagcgacggtgatcggacattcggcctggtggtgaaggacgtgcaactgacgttattcagaaatctggatgataagttctacctgacccctaggacaatgtaccagcctagagccgctacatctagcgacttcgtgcaaatcgagggatgtgacgtgctgttcgtgaatgccacagagattgacctgcccagcatcatccccgactacatcgacatcaaccagggcagcggctatatccctgaggcccctagagacggccaggcctatgtgcggaaagacggagaatgggtgttgctgagcaccttcctgggcagatccctgcctgagacaggcggacttgaggtgctgtttcagggccctggccaccaccaccaccaccatcaccactctgcctggtctcaccctcagttcgagaaaggcggaggcagtggcggaggcggcagcggcggctcggcttggagccacccccagttcgaaaagtgataatga

SEQ ID NO: 137 - DNA, 4200 bp, Artificial Sequence
  Description of Artificial Sequence: Synthetic polynucleotide
atgaaactgctgttcgtggtgctggtggtgctgcctagcatctacggcgataactttccttgctcgaagttcctgaacagaacgatcggcaaccactggaacctgatcgagaacttcctgctcaactacagcattcggctgccaccgaactctgacgtggtgctgggagactacttccccaccgtacagccttggttcaattgcatccggaacaacaacaacagcctgtacgtgacaatggaaaatctgaaggccctgtactgggattacgccaccgaaaacatcacatctgaccacagacagcggctgcacgtggtggtgaagggcaaaccttacagcatcaccgtgaccactacccggaacttcgacgccgccgagggcgcaatcatctgcatctgcaagggctccccacctacaacaaccactggcaatctcgactgcaactggggctcagactgcagactgaatcacaagttccctatctgtcccagcaactcccaagcaaactgcggcaacatgctgtacggcctgcagtggtttacagacgaggtggtggcctatctgcatggcgccatttacagaatcagcttcgagaacaagtggttcggaacagttaccctgggtgatatgcgagccaccaccctgcaaaccgccggcgctctggttgatctgtggtggttcaaccccgtttacgacgtaacctactacagagtaaacaacaagaacggcaccaccatcgtgtctaattgcaccgaccagtgcgccagctacgttgacaacgtgttcacgacacagcctggcggactgatcccaagcgactttagcttcaacaactggttcctgctgaccaatagctctacagtcgtgtcgggcaagctggtgaccagacagccactggtggtgaactgtctgtggcccgtgcccagcttcaaggaagccgcttctaccttctgcttcgagggcgccggattcgatcagtgtaatggcgctgttctgaacaacaccgtggacgtgatccggttcaacctgaacttcaccgccgatgtgcagagcggaatgggagccacagtgttctccctgaataccaccggcggcgtgatcctggaaatcagctgctacaacgacatcgtgagcgaaagcagcttttacagctacggggacatccccttcggcatcacagacggccctcggtactgttacgtgctgtataatggcaccacactgaaatacctgggcactctgcctcctagcgtgaaagagatcgccatcagcaaatggggccacttctacatcaacggctacaattttttcagcacatttcctatcgactgcatttctttcaacctgaccaccggagccagcggcgcattctggaccattgcctacacctcttacaccgaggccctcgtccaggtggaaaacaccgccatcaaaaaggtgacatactgcaacagccatatcaacaacatcaagtgcagccagctgacagccaacctgcagaacggcttttaccctgtggcttcttctgaagtgggcctggtgaataaaagcgtagtgctgctgccttccttcttcgcccacaccactgtgaacatcaccatcgacctgggaatgaagagaagcggatacggccagcccatcgcctcccctctgtcaaacatcaccctgcctatgcaggataacaataccgatgtgtactgtatcagaagcaaccagttcagcatctacgtccacagcacctgcaagagcagcctgtgggacaacgtgtttaatcaagactgtacagatgtgctggaagctaccgccgtgataaagaccggtacatgtcctttttccttcgacaaactgaacaaccacctgacattcaacaagttttgcctgtccctgagccctgtcggcgctaattgtaagtttgacgtggccgctagaacccggactaacgagcaggttgtgcggagcctttatgtgatctacgaggaaggcgacaacatcgtgggtgttcctagtgataatagcggcctgcacgatctgtctgtgctgcacctggattcttgcaccgactataacatctatggcagaacaggcgtcggcgtcatcagacagacaaacagcacactgctgagtggactgtattacacaagcctgagcggcgacctgctgggcttcaagaacgtctctgatggagtgatctactctgtgaccccctgtgatgtgtccgcccaggccgccgtgatcgatggagccatcgtgggggcaatgaccagtatcaacagcgagctgctgggcctaacacactggacgaccacccctaacttctactactatagcatctacaactacaccaacgagagaaccagaggtaccgccatcgacagcaacgacgtggactgcgagcctatcattacgtactctaacatcggagtgtgcaagaacggcgccctggtgttcatcaacgtgacccatagcgacggagatgtgcagcctatcagcaccgggaacgtgaccatccctaccaacttcaccatcagcgtgcaggtcgagtacatccaggtgtacaccacccccgtgtccatcgactgcgccagatacgtgtgtaatggcaatcctcgctgcaacaagctgctgacacagtacgtgtcggcatgccagacaatcgagcaggccctggccatgggcgccagactggagaacatggaagtggacagcatgctttttgtgtctgaaaacgccctcaagctggcctccgtggaggccttcaacagcaccgagaacctggaccccatttacaaggaatggcctaatatcgggggctcttggctgggcggcctgaaggacatcctgcctagccacaacagcaaaagaaagtaccggagccccatcgaggacctgctgtttgacaaggtggttacttccggactgggcaccgtggacgaggactataagcggtgtacaggcggctacgacatcgccgacctggtgtgcgcccagtactataacggtatcatggtgcttcccggagttgccaacgatgacaagatgacaatgtacacagcctcgctggctggaggtataacactgggagcccctggcggcggcgccgtggccattcccttccccgtcgccgtgcaggcccggcttaactacgtggccctgcagaccgacgtactgaacaagaatcagcagatcctggccaacgctttcaaccaggcaatcggaaatatcacacagcccttcggcaaggtgaacgacgctatccaccagactagcaagggcctggccaccgttgccaaggtgctggccaaggtccaggacgtggtcaacacccagggacaggccctgtctcacctcaccgtgcaactgcagaacaactttcaggccatcagcagctccatcagcgacatctacaaccgcctggaccctccttctgctgatgcgcaagtggacagacttatcaccggcaggctgacagccctgaacgcgtttgtctcccaaaccctcacaagacaggcagaagtgcgggccagcagacagttagccaaggataaggtgaatgagtgcgtgcggagccagagccagagattcggcttctgcgggaatggcacacacctgttcagcctggctaatgccgcccctaatggcatgattttcttccacacagttctgctgcctaccgcctaccagaccgtgaccgcctgtagcggcatctgcgccagcgacggtgatcggacattcggcctggtggtgaaggacgtgcaactgacgttattcagaaatctggatgataagttctacctgacccctaggacaatgtaccagcctagagccgctacatctagcgacttcgtgcaaatcgagggatgtgacgtgctgttcgtgaatgccacagagattgacctgcccagcatcatccccgactacatcgacatcaaccagggcagcggctatatccctgaggcccctagagacggccaggcctatgtgcggaaagacggagaatgggtgttgctgagcaccttcctgggcagatccctgcctgagacaggcggacttgaggtgctgtttcagggccctggccaccaccaccaccaccatcaccactctgcctggtctcaccctcagttcgagaaaggcggaggcagtggcggaggcggcagcggcggctcggcttggagccacccccagttcgaaaagtgataatga

SEQ ID NO: 138 - DNA, 696 bp, Artificial Sequence
  Description of Artificial Sequence: Synthetic polynucleotide
atgggctggtcctgcatcatcctgtttctcgtggccacagctacaggagtgcacgccaagctgccagagctggaagtggtgcagctgaatatcagcgcccacatggacttcggcgaagccagactggacagcgtgaccatcaacggcaacaccagctactgcgccacaaagccttacttccggctggaaaccaacttcatgtgcaccggatgtacaatgaacctgagaaccgacacctgtagcttcgacctgagcgccgtgaacaacggcatgtctttcagccagttctgcctgagcaccgagagcggcgcctgcgagatgaaaatcattgtgacctacgtgtggaattacctgctgcggcagagactgtacgtgaccgccgtcgagggccagacccacaccggcaccacaagcgtgcacgccacagatggctccggttatatccccgaggctcctagagatggacaggcctacgtgcggaaggacggcgagtgggttctgctgtctacattcctgggcagatctctgcctgaaaccggcggcctggaagtgctgttccagggccctggccaccaccatcatcaccaccaccacagcgcttggtcccaccctcagttcgagaagggcggcggaagcggcggaggcggctctggcggaagcgcctggagccacccccaatttgagaagtgataatga

SEQ ID NO: 139 - DNA, 3327 bp, Artificial Sequence
  Description of Artificial Sequence: Synthetic polynucleotide
atgcagagagccctgctgatcatgaccctgctgtgcctggtgagagccaagttcgccgacgacctgctggacctgctgacgtttcccggcgcccacagattcctgcacaagctgactagcaactctagcagcttctactcccgggccaacaacttcgacgttggcgtgctgcctggctaccccaccgagaacgtgaacctgttctcccctctgaccaattcaacactgcctatcaacggactgcatagaagctaccagcctctgatgctgaactgcctgacaaagatcaccaatcacaccctgagtatgtatctgctgcccagcgagatccagacctacagctgcggcggcgccatggtgaaataccaaacccacgacgccgtgcgaataattctggacctaaccgttacagatcacatctccgttgaagtcgtgggccaaagaggcgagaactacgtgttcgtgtgtagcgagcagttcaactacacaaccgccctgcacaacagcacattcttttcactgaactctgaactgtactgcttcaccaacaacacctacctgggaatcctccctcctgatctgaccgatttcaccgtgtacagaaccggccagttctacgccaacggctacctcctgggcaccctgcctatcaccgtgaactacgtgcgactgtaccggggccatctgtccgccaacagcgcccatttcgccctggccaacctgaccgataccctgataaccctgacaaatactaccatcagccagatcacttattgcgacaagagcgtggtggacagcatcgcttgtcagagaagctctcacgaggtcgaagatggcttctacagtgatcctaagagcgccgtgagagcccggcaaagaacaatcgtgaccttacctaagctgcccgagctggaggtggtgcagctgaacatcagcgcccacatggatttcggtgaagccagactggatagcgtgacaatcaatggcaacacatcttactgtgccaccaagccctactttcggctggagacaaacttcatgtgcaccggctgtactatgaacctgcggaccgacacctgtagcttcgacttgtctgctgtgaacaacggaatgagctttagccagttttgcctgagcacagagtctggagcctgcgagatgaaaataatcgtgacctacgtgtggaactacctgctgagacagagactgtacgtgaccgcggtcgagggccagacccacacaggaacaacaagcgtgcacgccacagacacatcttctgtgatcaccgacgtgtgcacagactacaccatctacggcgtgtccggcacaggcatcatcaaacccagcgacctgctgctgcacaatggcatcgccttcacctccccaacgggcgagctgtatgcctttaaaaacatcaccaccggtaagacgctgcaggtgctgccctgtgagacacctagccagctaatcgtgatcaataacaccgtggtgggcgccatcaccagctccaatagcaccgaaaacaaccggttcaccaccacaatcgtgacccctacattcttctacagcaccaacgccaccacattcaattgcaccaagcctgtgctgagctacgggcctatctcagtctgtagcgatggagccattgccggcacaagcaccttgcagaacacccggcctagcattgtgtctctgtacgacggagaagtggaaatccctagcgccttcagcctgagcgtgcagaccgagtacctgcaggtgcaggcagaacaggtgatcgtggactgcccccagtacgtgtgcaacggcaacagccgctgcctgcaactgctggcccagtacaccagcgcctgtagcaacatcgaggccgccctgcactctagtgcccagctggacagccgggaaatcatcaacatgttccagaccagcacccagagcctgcaactggccaacatcacaaacttcaagggcgactacaacttcagcagcatcctgaccaccagactgggcggcagatctccaatcgaagatctactgtttaacaaggtggtaacaagcggcctgggcacagtggaccaggactataaggcttgcagcagagatatggccatcgccgacctcgtgtgcagccagtactacaacgggatcatggtgctgccaggagtggtggacgccgaaaaaatggcgatgtacaccggaagcctgacaggcgccatggtctttggaggacctacagcagctgctgccatccccttccctaccgccgtgcaggcaagactgaactacgtggccctacagaccaacgtgttgcaggagaaccagaaaattctggctgagagcttcaaccaggccgtgggaaacatcagcctgcctctgtcctctgtgaacgacgccatccaacagacatctgaagctctgaacaccgttgctatcgccatcaagaagattcaaacagtcgtgaaccagcagggagaagctctgagccacctgacagctcagctgagcaacaacttccaggccatcagcacaagtatccaggatatctacaacagactggaaccccccgaagccaaccagcaggtggatagactcatcacaggcagactggccgctctgaatgcctacgtgacccagctgctgaaccagatgagccagataagacagtccagactcttggctcagcagaagatcaacgagtgcgtgaaaagccagagcagccggtacggcttctgcggcaatggaacccacatcttttctctgacacagactgcacctaatggaatcttcttcatgcacgccgtgctggtgcctaacaagttcaccagggtaaatgcctctgctggcatctgcgtggataacattaagggctattctctgcagccacagctgatcctgtatcagttcaacaatagttggcgggtgacccctagaaacatgtacgagcctagactgccgagacaggccgactttatccagctgacagactgcagcgtgaccttttataatacgaccgccgctaatctgcctaacatcatccccgacatcatcgacgtgaatcaaggctcgggctacatcccggaggcccctcgggacggccaggcctatgtgcggaaggatggcgagtgggtcctgctgtccaccttcctgggcagaagccttccagagaccggcggcctggaagtgctgttccaaggccctggccaccaccaccaccaccatcaccacagcgcctggtcccacccccagttcgagaagggcggcggcagcggcggcggcggatctggcggcagcgcctggagccatccccaattcgagaagtgataatga

SEQ ID NO: 140 - DNA, 696 bp, Artificial Sequence
  Description of Artificial Sequence: Synthetic polynucleotide
atgggctggtcctgcatcatcctgtttctcgtggccacagctacaggagtgcacgccaagctgccagagctggaagtggtgcagctgaatatcagcgcccacatggacttcggcgaagccagactggacagcgtgaccatcaacggcaacaccagctactgcgtgacaaagccttacttccggctggaaaccaacttcatgtgcaccggatgtacaatgaacctgagaaccgacacctgtagcttcgacctgagcgccgtgaacaacggcatgtctttcagccagttctgcctgagcaccgagagcggcgcctgcgagatgaaaatcattgtgacctacgtgtggaattacctgctgcggcagagactgtacgtgaccgccgtcgagggccagacccacaccggcaccacaagcgtgcacgccacagatggctccggttatatccccgaggctcctagagatggacaggcctacgtgcggaaggacggcgagtgggttctgctgtctacattcctgggcagatctctgcctgaaaccggcggcctggaagtgctgttccagggccctggccaccaccatcatcaccaccaccacagcgcttggtcccaccctcagttcgagaagggcggcggaagcggcggaggcggctctggcggaagcgcctggagccacccccaatttgagaagtgataatga

SEQ ID NO: 141 - DNA, 3327 bp, Artificial Sequence
  Description of Artificial Sequence: Synthetic polynucleotide
atgcagagagctctgctgatcatgacactgctgtgcctggtgcgggccaaattcgcagacgacctgctggacctgctgaccttcccaggcgcccaccggttcctacacaaactgacatctaacagcagcagcttttacagccgcgccaacaacttcgacgtgggtgtgctgcctggataccccaccgagaacgtgaacctgttcagcccgctgaccaacagcaccctgccaatcaacggcctgcacagaagctaccagcccctgatgctgaactgcctgacgaagatcaccaaccacactctgagcatgtacctgctcccaagcgagatccagacctacagctgcggcggagccatggtcaagtaccagacacacgacgccgtgagaatcatcctggatctgacagtgacagaccacatcagcgtggaggtggtgggccaaagaggcgagaattacgttttcgtgtgcagcgagcagttcaactacacaaccgccctgcacaacagcacattcttcagcctgaatagcgagctgtactgttttacaaacaacacctatctgggcatcctgccccccgacctgaccgacttcaccgtctaccggacaggccagttctacgccaatggatacctgttgggcaccctccccatcacagtgaattacgtccggctgtatagaggacacctgagcgccaatagcgcccatttcgccctggctaacctgaccgacaccctgatcaccctgacaaacaccaccatcagccagatcacatactgcgacaagtctgtggtggacagcatcgcctgtcagcggagcagccacgaggttgaggacggattttacagcgaccctaagtctgccgtgcgggctagacagagaaccattgtgaccctgccaaagctgcctgaactcgaagtggtgcagctgaacatctctgcccacatggatttcggcgaagccagactggatagcgtgaccatcaacggaaacaccagctactgcgccacaaagccttacttcagattggagacaaatttcatgtgcacaggttgtaccatgaacctgagaaccgacacctgtagtttcgacctgagtgccgtgaacaacggcatgtctttttcccagttctgcctatccacagagagcggcgcctgcgagatgaaaatcatcgtgacctatgtgtggaactacctgctgcggcagagactctacgtgaccgccgtggaaggccagacccataccggcacaaccagcgtgcacgccacagatacctcgagtgtgatcactgatgtgtgtacagattacaccatctacggcgtgagcggcacaggcatcatcaagcccagcgatctgctcctgcacaacggcatcgcctttacatcccctacaggcgaactgtacgcctttaagaacatcaccaccggcaagaccctccaagtgctgccctgtgaaacaccttcacagctcatcgtgatcaacaacacagtggtgggagctattacaagcagcaatagtaccgagaacaatagattcaccaccacaattgtgacccctaccttcttctacagcaccaacgccaccaccttcaactgcaccaaacctgtgctgtcttacggcccaatcagcgtctgctctgatggcgccattgccggcacctctaccctgcagaacacgagacctagcatcgtatccctgtacgacggcgaagtggagatcccttccgctttctctctgagcgtgcagacagaatacctgcaagtgcaagccgaacaagtgatcgtggactgccctcagtacgtatgcaacggcaactccagatgcctgcaactgctggcccagtacaccagcgcctgctccaacattgaggccgccctgcacagctctgcccagctggactctcgggaaatcatcaacatgttccagacgagcacacagagcctgcagctggccaacatcacaaacttcaagggcgactacaacttctctagcattctgaccaccagactgggaggcagaagccccatcgaggacctgctgttcaacaaggtggtgacatctggcttgggcaccgtggatcaggattacaaggcgtgttcccgcgacatggccatcgccgatctggtgtgttcccagtactacaacggaattatggtgcttcctggtgtggtggacgccgagaaaatggccatgtacaccggcagcctgaccggcgccatggtgttcggcggccctaccgccgccgctgccatccccttccccacagccgtccaggctaggctgaactacgtggcccttcagacaaacgtgctgcaggagaaccagaagatcctggctgaaagctttaaccaggcagtgggcaacatcagcctgcctctgagctccgtgaacgacgccatccagcagaccagcgaagccttgaataccgtggccatcgccatcaagaagatccagaccgtggtgaaccaacagggtgaggccctgagccatctgactgctcagctgagcaacaacttccaggcgatcagcaccagcatccaagacatctacaaccggctggaacctcctgaggccaatcagcaggttgatagactgatcacaggacggctggccgccctgaacgcctacgtgacgcagctcctgaaccagatgagccagatccggcaatctagattactggcccagcaaaagatcaacgagtgcgtgaagtcccagagcagcaggtacgggttctgcggcaatggcacacacatcttcagcctgacccagaccgcccctaacggcatcttcttcatgcacgccgtgcttgtgcccaacaagttcacaagagtgaacgcctctgctggcatctgcgtggacaacatcaagggctatagcctgcagcctcagctgatcctgtatcagtttaacaactcttggcgggtgacccctcggaacatgtacgagcctagactgccacggcaggctgacttcatccagctgaccgattgcagcgtgaccttctataacaccaccgctgccaacctgcctaacatcatcccagatatcatcgacgtgaatcagggcagtggctacatccctgaggcccctagagatggacaggcatacgtgagaaaggacggcgagtgggtgctcctgtcaaccttcctgggcagatccctgcctgaaaccggcggcctggaagtgctgttccaaggccctggccaccaccaccaccaccaccaccactctgcttggagccatccacagtttgagaagggcggcggcagcggcggaggcggcagcggcggatctgcttggtcccacccccagttcgagaaatgataatga

SEQ ID NO: 142 - DNA, 3330 bp, Artificial Sequence
  Description of Artificial Sequence: Synthetic polynucleotide
atgcagcgtgccctgctgatcatgaccctgctgtgcctggtcagagccaagttcgctgacgacctgctggacctcctcaccttccccggcgcccaccggttcctgcacaagctgacccggaacagctctagcctgtacagccgggccaacaacaacttcgacgtgggagtgctcccagggtaccccacaaaaaacgtgaacctgttcagccccctgacaaactctaccctccctatcaatggactgcacagatcttaccagccactgatgctgaactgcctgactaaaattaccaatcacacactgagcatgtacctgctgccttcagaaatccagacatacagctgcggcggagctatggtgaagtaccaaactcatgatgccgtcagaatcattctggacctgaccacaacagaccacatcagcgtggaagtggtgggccagcacggcgaaaattacgtgttcgtgtgctccgaacagtttaactacaccacagccctgcacaacagcacatttttcagcctgaatagcgagctgtactgctttacaaacaacacctacctgggcatcctgccacctgatctgaccgatttcacagtgtacagaacaggccagttctatgccaacggctatctgctgggcaccctgcctatcaccgtaaactacgtgcgcctgtaccggggccacctgtctgccaatagcgctcacttcgccctggccaacctgaccgatacactgatcaccctgaccaataccacaatcagccagatcacctactgcgacaagagcgtggtagacagcatcgcctgtcagagatccagtcacgaggtggaagatggcttctactctgaccccaagagcgcagtgcgggctagacagagaaccatcgtgaccctgcctaaactgcctgagctggaagtggtgcagctgaacatcagcgcccacatggacttcggcgaggccagactggattcagtgactatcaacggcaacacaagttattgtgtgaccaagccctacttcagactagagacgaacttcatgtgcacaggttgtaccatgaacctgcggaccgatacctgttcttttgacctcagcgcggtgaacaacggcatgagcttcagccaattctgtctgtctaccgaaagcggcgcctgcgagatgaagatcatcgtgacctacgtgtggaactacctgctgagacagagactttacgtcaccgccgtggaaggccagacacacaccggaaccacctctgtgcacgcaacagacaccagcagcgtgatcaccgacgtgtgcactgattacaccatctacggcgtgtccggcaccggcatcatcaagcccagcgacctgctgctgcacaacgggatcgccttcacctctcctacaggcgaactgtatgccttcaagaacatcaccacgggaaagaccctgcaggtcctgccgtgcgagacgcctagccagctgatcgtgatcaacaacacagtggtgggcgccatcaccagctctaacagcaccgagaacaatagatttacaacaaccatcgtgacacctacctttttctacagtacaaacgccaccaccttcaactgcacaaagcctgtgctgtcttacggccccatctccgtctgttccgacggcgccatcgccgggacaagcaccctgcagaacacaagaccttctatcgtcagcctctacgacggcgaggttgagatcccctccgcctttagcctgtccgtgcagaccgagtacctgcaggtgcaggccgagcaggtgatcgtggactgcccccagtacgtgtgtaatggcaattctcgctgcttacagctgctcgcccagtataccagtgcctgtagcaacatcgaggctgccctgcacagcagcgctcagctggacagcagggaaatcatcaacatgttccagaccagtacacagagcctgcagctggccaatatcactaactttaagggcgactacaacttcagctctatcctgaccacccggatcggcggccggagccctatcgaggacctgcttttcaacaaggtggtgacaagcggtctgggcaccgtggaccaggactataagtcttgtagccgggatatggccatcgccgatctggtgtgctctcagtactacaatggcatcatggtgctgcctggcgtggtcgatgccgagaaaatggccatgtacacgggatcactgaccggagcgatggttttcggaggccctacagctgctgccgccatccctttcccaaccgccgtgcaagccagactgaattacgtggccctgcaaaccaatgtgctgcaggagaaccagaagatcctggccgaaagcttcaaccaggccgtgggcaacatatcactgcccctcagctcggtgaacgacgccatccagcagaccagcgaggccctgaacaccgtggccattgctatcaagaaaatccagaccgtggtgaaccagcagggcgaggccctgtcccaccttaccgctcagttgtctaacaactttcaggccatttccaccagcatccaggacatctacaacagactggaacctccagaagctaatcagcaggtggacagactgatcaccggcagactcgccgccctgaacgcctacgtgacccagctgctgaaccagatgagccaaatcagacagtctagactgctggctcagcagaaaattaatgagtgcgtgaagagccaaagcagcagatacggcttctgcggcaacggcacccatattttcagcctgacacagacagcccctaacggaattttcttcatgcacgccgtgctggtgcccaacaagttcaccagagtgaacgcctccgctggcatctgcgtggacaacaccagaggttacagcctgcagcctcagctgatcctgtaccagttcaacaactcctggcgggtaacccctagaaacatgtacgagcctagattgcctagacaagctgatttcatccaactcacagactgcagcgtcaccttctacaacaccaccgccgccaacctgcccaacatcatccctgatatcatagatgtgaaccagggctccggctacatccccgaggcccctcgggacggacaggcatacgtgcggaaggacggagaatgggtcctgctgagcacatttctgggcaggagcctgcctgaaacaggcggactggaggtgctgttccaaggccctggccaccaccaccaccaccaccatcattctgcctggagccaccctcagttcgagaaaggcggcgggtctggaggtggcggaagcggcggcagcgcctggagccacccccagttcgagaagtgataatga

SEQ ID NO: 143 - DNA, 780 bp, Artificial Sequence
  Description of Artificial Sequence: Synthetic polynucleotide
atgggctggagctgtattatcctgtttctggtggccacagccacaggtgtgcacgccaccaacctctgtcctttcgacgaggtcttcaacgccacaagattcgccagcgtgtacgcctggaacagaaagagaatcagcaactgcgtggctgactacagcgtgctgtataatctggcccctttcttcacctttaagtgctacggcgtgtctccaaccaagctgaacgacctgtgcttcaccaacgtgtacgctgatagcttcgtgatcagaggagatgaggtgcggcaaatcgcccctggccagaccggaaacatcgccgactacaactataagctgcctgatgacttcaccggctgcgtgatcgcctggaatagcaacaagctggactctaaggtgtctggcaattacaactacctgtaccggctgttcagaaagagcaatctgaagccttttgagagagacatctccaccgaaatctaccaggccggcaacaaaccctgcaacggcgttgctggcttcaactgttacttccctctgcggtcctacagctttagaccaacctacggcgtgggccaccagccctacagggtggtcgtgctgagcttcgaactgctgcacgctcctgccacagtgtgcggccccaagaaaggatctctggaagtgcttttccagggccctggatctgcctggtcccacccccagttcgaaaaaggcggaggcagcggcggcggaggcagcggcggcagcgcctggagccatcctcagttcgagaagtgatga

SEQ ID NO: 144 - DNA, 774 bp, Artificial Sequence
  Description of Artificial Sequence: Synthetic polynucleotide
atgggctggtcatgcatcatcctgttcctggtcgccaccgccaccggggtgcacgccaccaacctgtgccccttcgacgaagtgttcaacgccacaagattcgccagcgtgtacgcctggaacagaaagcggatcagcaattgcgtggctgattacagcgtgctgtataacctggcccctttcttcaccttcaagtgctacggcgtgtctcctaccaagctgaacgacctgtgttttaccaatgtgtacgctgatagcttcgtgattagaggcgacgaggtgcgccagatcgcccctggccagacaggaaacatcgccgactacaactataagctccctgatgacttcaccggctgtgtgatcgcctggaatagcaacaagctggacagcaaggtgtccggcaactacaactacctgtaccggctgtttaggaaaagcaacctgaagcccttcgagcgggacatctctacagaaatctaccaggccggcaacaaaccatgtaatggcgtggccggatttaactgctacttccccctgagaagctacagcttcagacctacatacggcgtgggccaccagccttacagagtggtggtcttgtctttcgagctgctgcacgctcctgctaccgtgtgcggcccaggcagcctggaagttctgttccagggccctggctctgcctggtcccatcctcagttcgaaaagggcggcggcagcggcggaggcggcagcggcggaagcgcctggagccacccccaatttgagaagtgatga

SEQ ID NO: 145 - DNA, 807 bp, Artificial Sequence
  Description of Artificial Sequence: Synthetic polynucleotide
atgggctggtcctgcatcatcctgttcctggtggctaccgccacaggcgtgcacgccaccaacctgtgccccttcgacgaggtgttcaacgccacaagattcgcctctgtctacgcctggaatagaaaaagaatcagcaactgcgtggctgattactctgtgctgtataatctggcccctttcttcaccttcaagtgctacggcgtgtcccctaccaagctgaacgacctgtgttttacaaacgtgtacgccgatagcttcgtgatcagaggcgacgaagtgcggcagatcgcccctggccagaccggcaacatcgccgactacaactataagctgcctgatgacttcaccggttgtgtgattgcctggaacagcaacaaactggactcaaaggtgtctggcaattacaactacctgtaccggctgttcagaaagagcaatctcaagccattcgagcgggacatcagcaccgaaatctaccaggccggcaacaagccctgcaacggcgttgctggcttcaactgttacttccctctgagaagctacagctttaggcccacctacggcgtgggccaccagccttacagagtggtcgtgctgagcttcgagctgctgcacgccccagccaccgtgtgcggccccaagaaggggagcggcctgcctgagacaggcggaggcagcctggaagtgctgtttcagggccctggaagcgcttggtcccatcctcagttcgaaaagggcggcggaagcggaggcggcggctctggaggcagcgcctggagccacccccaatttgagaaatgatga

SEQ ID NO: 146 - DNA, 801 bp, Artificial Sequence
  Description of Artificial Sequence: Synthetic polynucleotide
atgggctggtcctgcatcatcctgttcctggtggccacagccaccggcgttcatgctacaaacctgtgtcctttcgacgaggtgttcaacgccaccagattcgccagcgtctacgcctggaatagaaagcggatcagcaattgcgtggccgattatagcgtgctgtacaacctcgccccttttttcaccttcaagtgctacggcgtgtccccaacaaagctgaacgacctgtgcttcaccaacgtgtacgccgacagcttcgtgattagaggcgatgaggtgcggcagatcgcccctggccagacaggaaacatcgctgattacaactacaagctgcccgacgacttcaccggttgtgtgatcgcctggaacagcaacaagctggactctaaggtgtctggcaactataattacctgtacagactgtttagaaaaagcaatctgaagcccttcgaacgggacatcagcaccgaaatctaccaggccggcaacaaaccttgtaacggcgtggctggcttcaactgctacttccccctgagaagctacagcttcagacctacctacggagtgggccaccagccttaccgggtggtcgtgctttcttttgagctgctgcacgccccagctaccgtgtgcggccccggcagcggcctgcctgagacaggcggaggctctctggaagtgctgttccagggccctggctccgcctggagccacccccagttcgagaagggcggcggaagcggcggaggcggatctggcggcagcgcctggagccaccctcaatttgaaaagtgatga

SEQ ID NO: 147 - protein, 1270 aa, Artificial Sequence
  Description of Artificial Sequence: Synthetic polypeptide
MFIFLLFLTLTSGSDLDRCTTFDDVQAPNYTQHTSSMRGVYYPDEIFRSDTLYLTQDLFLPFYSNVTGFHTINHTFDNPVIPFKDGIYFAATEKSNVVRGWVFGSTMNNKSQSVIIINNSTNVVIRACNFELCDNPFFAVSKPMGTQTHTMIFDNAFNCTFEYISDAFSLDVSEKSGNFKHLREFVFKNKDGFLYVYKGYQPIDVVRDLPSGFNTLKPIFKLPLGINITNFRAILTAFSPAQDTWGTSAAAYFVGYLKPTTFMLKYDENGTITDAVDCSQNPLAELKCSVKSFEIDKGIYQTSNFRVVPSGDVVRFPNITNLCPFGEVFNATKFPSVYAWERKKISNCVADYSVLYNSTFFSTFKCYGVSATKLNDLCFSNVYADSFVVKGDDVRQIAPGQTGVIADYNYKLPDDFMGCVLAWNTRNIDATSTGNYNYKYRYLRHGKLRPFERDISNVPFSPDGKPCTPPALNCYWPLNDYGFYTTTGIGYQPYRVVVLSFELLNAPATVCGPKLSTDLIKNQCVNFNFNGLTGTGVLTPSSKRFQPFQQFGRDVSDFTDSVRDPKTSEILDISPCSFGGVSVITPGTNASSEVAVLYQDVNCTDVSTAIHADQLTPAWRIYSTGNNVFQTQAGCLIGAEHVDTSYECDIPIGAGICASYHTVSLLRSTSQKSIVAYTMSLGADSSIAYSNNTIAIPTNFSISITTEVMPVSMAKTSVDCNMYICGDSTECANLLLQYGSFCTQLNRALSGIAAEQDRNTREVFAQVKQMYKTPTLKYFGGFNFSQILPDPLKPTKRSFIEDLLFNKVTLADAGFMKQYGECLGDINARDLICAQKFNGLTVLPPLLTDDMIAAYTAALVSGTATAGWTFGAGAALQIPFAMQMAYRFNGIGVTQNVLYENQKQIANQFNKAISQIQESLTTTSTALGKLQDVVNQNAQALNTLVKQLSSNFGAISSVLNDILSRLDPPEAEVQIDRLITGRLQSLQTYVTQQLIRAAEIRASANLAATKMSECVLGQSKRVDFCGKGYHLMSFPQAAPHGVVFLHVTYVPSQERNFTTAPAICHEGKAYFPREGVFVFNGTSWFITQRNFFSPQIITTDNTFVSGNCDVVIGIINNTVYDPLQPELDSFKEELDKYFKNHTSPDVDLGDISGINASVVNIQKEIDRLNEVAKNLNESLIDLQELGKYEQGSGYIPEAPRDGQAYVRKDGEWVLLSTFLGRSLEVLFQGPGHHHHHHHHSAWSHPQFEKGGGSGGGGSGGSAWSHPQFEK

SEQ ID NO: 148 - protein, 1270 aa, Artificial Sequence
  Description of Artificial Sequence: Synthetic polypeptide
MFIFLLFLTLTSGSDLDRCTTFDDVQAPNYTQHTSSMRGVYYPDEIFRSDTLYLTQDLFLPFYSNVTGFHTINHTFDNPVIPFKDGIYFAATEKSNVVRGWVFGSTMNNKSQSVIIINNSTNVVIRACNFELCDNPFFAVSKPMGTQTHTMIFDNAFNCTFEYISDAFSLDVSEKSGNFKHLREFVFKNKDGFLYVYKGYQPIDVVRDLPSGFNTLKPIFKLPLGINITNFRAILTAFLPAQDTWGTSAAAYFVGYLKPTTFMLKYDENGTITDAVDCSQNPLAELKCSVKSFEIDKGIYQTSNFRVVPSRDVVRFPNITNLCPFGEVFNATKFPSVYAWERKRISNCVADYSVLYNSTFFSTFKCYGVSATKLNDLCFSNVYADSFVVKGDDVRQIAPGQTGVIADYNYKLPDDFMGCVLAWNTRNIDATSTGNYNYKYRYLRHGKLRPFERDISNVPFSPDGKPCTPPALNCYWPLNDYGFYTTTGIGYQPYRVVVLSFELLNAPATVCGPKLSTDLIKNQCVNFNFNGLTGTGVLTPSSKRFQPFQQFGRDVSDFTDSVRDPKTSEILDISPCSFGGVSVITPGTNASSEVAVLYQDVNCTDVSTAIHADQLTPAWRIYSTGNNVFQTQAGCLIGAEHVDTSYECDIPIGAGICASYHTVSLLRSTSQKSIVAYTMSLGADSSIAYSNNTIAIPTNFSISITTEVMPVSMAKTSVDCNMYICGDSTECANLLLQYGSFCTQLNRALSGIAAEQDRNTREVFAQVKQMYKTPTLKDFGGFNFSQILPDPLKPTKRSFIEDLLFNKVTLADAGFMKQYGECLGDINARDLICAQKFNGLTVLPPLLTDDMIAAYTAALVSGTATAGWTFGAGAALQIPFAMQMAYRFNGIGVTQNVLYENQKQIANQFNKAISQIQESLTTTSTALGKLQDVVNQNAQALNTLVKQLSSNFGAISSVLNDILSRLDPPEAEVQIDRLITGRLQSLQTYVTQQLIRAAEIRASANLAATKMSECVLGQSKRVDFCGKGYHLMSFPQAAPHGVVFLHVTYVPSQERNFTTAPAICHEGKAYFPREGVFVFNGTSWFITQRNFFSPQIITTDNTFVSGNCDVVIGIINNTVYDPLQPELDSFKEELDKYFKNHTSPDVDLGDISGINASVVNIQEEIDRLNEVAKNLNESLIDLQELGKYEQGSGYIPEAPRDGQAYVRKDGEWVLLSTFLGRSLEVLFQGPGHHHHHHHHSAWSHPQFEKGGGSGGGGSGGSAWSHPQFEK

SEQ ID NO: 149 - protein, 1270 aa, Artificial Sequence
  Description of Artificial Sequence: Synthetic polypeptide
MFIFLLFLTLTSGSDLDRCTTFDDVQAPNYTQHTSSMRGVYYPDEIFRSDTLYLTQDLFLPFYSNVTGFHTINHTFDNPVIPFKDGIYFAATEKSNVVRGWVFGSTMNNKSQSVIIINNSTNVVIRACNFELCDNPFFAVSKPMGTQTHTMIFDNAFNCTFEYISDAFSLDVSEKSGNFKHLREFVFKNKDGFLYVYKGYQPIDVVRDLPSGFNTLKPIFKLPLGIKITNFRAILTAFLPAQDTWGTSAAAYFVGYLKPTKFMLKYDENGTITDAVDCSQNPLAELKCSVKSFEIDKGIYQTSNFRVVPSGDVVRFPNITNLCPFGEVFNATKFPSVYAWERKRISNCVADYSVLYNSTSFSTFKCYGVSATKLNDLCFSNVYADSFVVKGDDVRQIAPGQTGVIADYNYKLPDDFMGCVLAWNTRNIDATSTGNYNYKYRYLRHGKLRPFERDISNVPFSPDGKPCTPPALNCYWPLKDYGFYTTSGIGYQPYRVVVLSFELLNAPATVCGPKLSTDLIKNQCVNFNFNGLTGTGVLTPSSKRFQPFQQFGRDVSDFTDSVRDPKTSEILDISPCSFGGVSVITPGTNASSEVAVLYQDVNCTDVPTAIHADQLTPAWRIYSTGNNVFQTQAGCLIGAEHVDTSYECDIPIGAGICASYHTVSSLRSTSQKSIVAYTMSLGADSSIAYSNNTIAIPTNFLISITTEVMPVSMAKTSVDCNMYICGDSTECANLLLQYGSFCAQLNRALSGIAVEQDRNTREVFAQVKQMYKTPTLKDFGGFNFSQILPDPLKPTKRSFIEDLLFNKVTLADAGFMKQYGECLGDINARDLICAQKFNGLTVLPPLLTDDMIAAYTAALVSGTATAGWTFGAGAALQIPFAMQMAYRFNGIGVAQNVLYENQKQIANQFNKAISQIQESLTTTSTALGKLQDVVNQNAQALNTLVKQLSSNFGAISSVLNDILSRLDPPEAEVQIDRLITGRLQSLQTYVTQQLIRAAEIRASANLAATKMSECVLGQSKRVDFCGKGYHLMSFPQAAPHGVVFLHVTYVPSQERNFTTAPAICHEGKAYFPREGVFVFNGTSWFITQRNFFSPQIITTDNTFVSGNCDVVIGIINNTVYDPLQPELDSFKEELDKYFKNHTSPDVDLGDISGINASVVNIQEEIDRLNEVAKNLNESLIDLQELGKYEQGSGYIPEAPRDGQAYVRKDGEWVLLSTFLGRSLEVLFQGPGHHHHHHHHSAWSHPQFEKGGGSGGGGSGGSAWSHPQFEK

SEQ ID NO: 150 - protein, 1270 aa, Artificial Sequence
  Description of Artificial Sequence: Synthetic polypeptide
MFIFLLFLTLTSGSDLDRCTTFDDVQAPNYTQHTSSMRGVYYPDEIFRSDTLYLTQDLFLPFYSNVTGFHTINHTFGNPVIPFKDGIYFAATEKSNVVRGWVFGSTMNNKSQSVIIINNSTNVVIRACNFELCDNPFFAVSKPMGTQTHTMIFDNAFNCTFEYISDAFSLDVSEKSGNFKHLREFVFKNKDGFLYVYKGYQPIDVVRDLPSGFNTLKPIFKLPLGINITNFRAILTAFSPAQDIWGTSAAAYFVGYLKPTTFMLKYDENGTITDAVDCSQNPLAELKCSVKSFEIDKGIYQTSNFRVVPSGDVVRFPNITNLCPFGEVFNATKFPSVYAWERKKISNCVADYSVLYNSTFFSTFKCYGVSATKLNDLCFSNVYADSFVVKGDDVRQIAPGQTGVIADYNYKLPDDFMGCVLAWNTRNIDATSTGNYNYKYRYLRHGKLRPFERDISNVPFSPDGKPCTPPALNCYWPLNDYGFYTTTGIGYQPYRVVVLSFELLNAPATVCGPKLSTDLIKNQCVNFNFNGLTGTGVLTPSSKRFQPFQQFGRDVSDFTDSVRDPKTSEILDISPCAFGGVSVITPGTNASSEVAVLYQDVNCTDVSTAIHADQLTPAWRIYSTGNNVFQTQAGCLIGAEHVDTSYECDIPIGAGICASYHTVSLLRSTSQKSIVAYTMSLGADSSIAYSNNTIAIPTNFSISITTEVMPVSMAKTSVDCNMYICGDSTECANLLLQYGSFCTQLNRALSGIAAEQDRNTREVFAQVKQMYKTPTLKYFGGFNFSQILPDPLKPTKRSFIEDLLFNKVTLADAGFMKQYGECLGDINARDLICAQKFNGLTVLPPLLTDDMIAAYTAALVSGTATAGWTFGAGAALQIPFAMQMAYRFNGIGVTQNVLYENQKQIANQFNKAISQIQESLTTTSTALGKLQDVVNQNAQALNTLVKQLSSNFGAISSVLNDILSRLDPPEAEVQIDRLITGRLQSLQTYVTQQLIRAAEIRASANLAATKMSECVLGQSKRVDFCGKGYHLMSFPQAAPHGVVFLHVTYVPSQERNFTTAPAICHEGKAYFPREGVFVFNGTSWFITQRNFFSPQIITTDNTFVSGNCDVVIGIINNTVYDPLQPELDSFKEELDKYFKNHTSPDVDLGDISGINASVVNIQKEIDRLNEVAKNLNESLIDLQELGKYEQGSGYIPEAPRDGQAYVRKDGEWVLLSTFLGRSLEVLFQGPGHHHHHHHHSAWSHPQFEKGGGSGGGGSGGSAWSHPQFEK

SEQ ID NO: 151 - protein, 1284 aa, Artificial Sequence
  Description of Artificial Sequence: Synthetic polypeptide
MFVFLFVLPLVSSQCVNLTTRTGIPPGYTNSSTRGVYYPDKVFRSSILHLTQDLFLPFFSNVTWFNTIHLNYQGGFKKFDNPVLPFNDGVYFASTEKSNIIRGWIFGTTLDARTQSLLIVNNATNVVIKVCEFQFCTDPFLGVYYHNNNKTWVENEFRVYSSANNCTFEYISQPFLMDLEGKQGNFKNLREFVFKNVDGYFKIYSKHTPIDLVRDLPRGFAALEPLVDLPIGINITRFQTLLALHRSYLTPGKLESGWTTGAAAYYVGYLQQRTFLLSYNQNGTITDAVDCSLDPLSETKCTLKSLTVEKGIYQTSNFRVQPTISIVRFPNITNLCPFGEVFNASKFASVYAWNRKRISNCVADYSVLYNSTSFSTFKCYGVSPTKLNDLCFTNVYADSFVVKGDEVRQIAPGQTGVIADYNYKLPDDFTGCVIAWNSVKQDALTGGNYGYLYRLFRKSKLKPFERDISTEIYQAGSTPCNGQVGLNCYYPLERYGFHPTTGVNYQPFRVVVLSFELLNGPATVCGPKLSTTLVKDKCVNFNFNGLTGTGVLTTSKKQFLPFQQFGRDISDTTDAVRDPQTLEILDITPCSFGGVSVITPGTNTSNQVAVLYQDVNCTEVPMAIHAEQLTPAWRVYSAGANVFQTRAGCLVGAEHVNNSYECDIPVGAGICASYHSMSSFRSVNQRSIIAYTMSLGAENSVAYSNNSIAIPTNFTISVTTEILPVSMTKTSVDCTMYICGDSIECSNLLLQYGSFCTQLNRALTGIAVEQDKNTQEVFAQVKQIYKTPPIKDFGGFNFLQILPDPSKPSKRSFIEDLLFNKVTLADAGFIKQYGDCLGDIAARDLICAQKFNGLTVLPPLLTDEMIAQYTSALLAGTITSGWTFGAGAALQIPFAMQMAYRFNGIGVTQNVLYENQKLIANQFNSAIGKIQDSLSSTASALGKLQDVVNQNAQALNTLVKQLSSNFGAISSVLNDILSRLDPPEAEVQIDRLITGRLQSLQTYVTQQLIRAAEIRASANLAATKMSECVLGQSKRVDFCGKGYHLMSFPQSAPHGVVFLHVTYVPAQEKNFTTAPAICHEGKAHFPREGVFVSNGTHWFITQRNFYEPQIITTDNTFVSGSCDVVIGIVNNTVYDPLQPELDSFKEELDKYFKNHTSPDVDLGDISGINASVVNIQKEIDRLNEVAKNLNESLIDLQELGKYEQGSGYIPEAPRDGQAYVRKDGEWVLLSTFLGRSLEVLFQGPGHHHHHHHHSAWSHPQFEKGGGSGGGGSGGSAWSHPQFEK

SEQ ID NO: 152 - protein, 1282 aa, Artificial Sequence
  Description of Artificial Sequence: Synthetic polypeptide
MFVFLFVLPLVSSQCVNLTTRTGIPPGYTNSSTRGVYYPDKVFRSSILHLTQDLFLPFFSNVTWFNTITYQGGSKKFDNPVLPFNDGVYFASTEKSNIIRGWIFGTTLDARTQSLLIVNNATNVVIKVCEFQFCTDPFLGVYYHNNNKTWVENEFRVYSSANNCTFEYISQPFLMDLEGKQGNFKNLREFVFKNVDGYFKIYSKHTPIDLVRDLPRGFAALEPLVDLPIGINITRFQTLLALHRSYLTPGKLESGWTTGAAAYYVGYLQQRTFLLSYNQNGTITDAVDCSLDPLSETKCTLKSLTVEKGIYQTSNFRVQPTISIVRFPNITNLCPFGEVFNASKFASVYAWNRKRISNCVADYSVLYNSTSFSTFKCYGVSPTKLNDLCFTNVYADSFVVKGDEVRQIAPGQTGVIADYNYKLPDDFTGCVIAWNSVKQDALTGDNYGYLYRLFRKSKLKPFERDISTEIYQAGSTPCNGQVGLNCYYPLERYGFHPTTGVNYQPFRVVVLSFELLNGPATVCGPKLSTTLVKDKCVNFNFNGLTGTGVLTTSKKQFLPFQQFGRDISDTTDAVRDPQTLEILDITPCSFGGVSVITPGTNTSNQVAVLYQDVNCTEVPMAIHAEQLTPAWRVYSAGANVFQTRAGCLVGAEHVNNSYECDIPVGAGICASYHSMSSFRSVNQRSIIAYTMSLGAENSVAYSNNSIAIPTNFTISVTTEILPVSMTKTSVDCTMYICGDSIECSNLLLQYGSFCTQLNRALTGIAVEQDKNTQEVFAQVKQIYKTPPIKDFGGFNFSQILPDPSKPSKRSFIEDLLFNKVTLADAGFIKQYGDCLGDIAARDLICAQKFNGLTVLPPLLTDEMIAQYTSALLAGTITSGWTFGAGAALQIPFAMQMAYRFNGIGVTQNVLYENQKLIANQFNSAIGKIQDSLSSTASALGKLQDVVNQNAQALNTLVKQLSSNFGAISSVLNDILSRLDPPEAEVQIDRLITGRLQSLQTYVTQQLIRAAEIRASANLAATKMSECVLGQSKRVDFCGKGYHLMSFPQSAPHGVVFLHVTYVPAQEKNFTTAPAICHEGKAHFPREGVFVSNGTHWFITQRNFYEPQIITTDNTFVSGSCDVVIGIVNNTVYDPLQPELDSFKEELDKYFKNHTSPDVDLGDISGINASVVNIQKEIDRLNEVAKNLNESLIDLQELGKYEQGSGYIPEAPRDGQAYVRKDGEWVLLSTFLGRSLEVLFQGPGHHHHHHHHSAWSHPQFEKGGGSGGGGSGGSAWSHPQFEK

SEQ ID NO: 153 - protein, 1282 aa, Artificial Sequence
  Description of Artificial Sequence: Synthetic polypeptide
MFVFLFVLPLVSSQCVNLTTRTGIPPGYTNSSTRGVYYPDKVFRSSILHLTQDLFLPFFSNVTWFNTINYQGGFKKFDNPVLPFNDGVYFASTEKSNIIRGWIFGTTLDARTQSLLIVNNATNVVIKVCEFQFCTDPFLGVYYHNNNKTWVENEFRVYSSANNCTFEYISQPFLMDLEGKQGNFKNLREFVFKNVDGYFKIYSKHTPIDLVRDLPRGFAALEPLVDLPIGINITRFQTLLALHRSYLTPGKLESGWTTGAAAYYVGYLQQRTFLLSYNQNGTITDAVDCSLDPLSETKCTLKSLTVEKGIYQTSNFRVQPTISIVRFPNITNLCPFGEVFNASKFASVYAWNRKRISNCVADYSVLYNSTSFSTFKCYGVSPTKLNDLCFTNVYADSFVVKGDEVRQIAPGQTGVIADYNYKLPDDFTGCVIAWNSVKQDALTGGNYGYLYRLFRKSKLKPFERDISTEIYQAGSTPCNGQVGLNCYYPLERYGFHPTTGVNYQPFRVVVLSFELLNGPATVCGPKLSTTLVKDKCVNFNFNGLTGTGVLTTSKKQFLPFQQFGRDISDTTDAVRDPQTLEILDITPCSFGGVSVITPGTNTSNQVAVLYQDVNCTEVPMAIHAEQLTPAWRVYSAGANVFQTRAGCLVGAEHVNNSYECDIPVGAGICASYHSMSSFRSVNQRSIIAYTMSLGAENSVAYSNNSIAIPTNFTISVTTEILPVSMTKTSVDCTMYICGDSIECSNLLLQYGSFCTQLNRALTGIAVEQDKNTQEVFAQVKQIYKTPPIKDFGGFNFSQILPDPSKPSKRSFIEDLLFNKVTLADAGFIKQYGDCLGDIAARDLICAQKFNGLTVLPPLLTDEMIAQYTSALLAGTITSGWTFGAGAALQIPFAMQMAYRFNGIGVTQNVLYENQKLIANQFNSAIGKIQDSLSSTASALGKLQDVVNQNAQALNTLVKQLSSNFGAISSVLNDILSRLDPPEAEVQIDRLITGRLQSLQTYVTQQLIRAAEIRASANLAATKMSECVLGQSKRVDFCGKGYHLMSFPQSAPHGVVFLHVTYVPAQEKNFTTAPAICHEGKAHFPREGVFVSNGTHWFITQRNFYEPQIITTDNTFVSGSCDVVIGIVNNTVYDPLQPELDSFKEELDKYFKNHTSPDVDLGDISGINASVVNIQKEIDRLNEVAKNLNESLIDLQELGKYEQGSGYIPEAPRDGQAYVRKDGEWVLLSTFLGRSLEVLFQGPGHHHHHHHHSAWSHPQFEKGGGSGGGGSGGSAWSHPQFEK

SEQ ID NO: 154 - protein, 1280 aa, Artificial Sequence
  Description of Artificial Sequence: Synthetic polypeptide
MFVFLFVLPLVSSQCVNLTTRTGIQPGYTNSSTRGVYYPDKVFRSSILHLTQDLFLPFFSNVTWFNTINYQGGFKKFDNPVLPFNDGVYFASTEKSNIIRGWIFGTTLDARTQSLLIVNNATNVVIKVCEFQFCTDPFLGVYYHNNNKTWVENEFRVYSSANNCTFEYISQPFLMDLEGKQGNFKNLREFVFKNVDGYFKIYSKHTPIDLVRDLPRGFAALEPLVDLPIGINITRFQTLLALHRSYLTPGKLESGWTTGAAAYYVGYLQQRTFLLSYNQNGTITDAVDCSLDPLSETKCTLKSLTVEKGIYQTSNFRVQPTISIVRFPNITNLCPFGEVFNASKFASVYAWNRKRISNCVADYSVLYNSTSFSTFKCYGVSPTKLNDLCFTNVYADSFVVKGDEVRQIAPGQTGVIADYNYKLPDDFTGCVIAWNSVKQDALTGGNYLYRLFRKSKLKPFERDISTEIYQAGSTPCNGQVGLNCYYPLERYGFHPTTGVNYQPFRVVVLSFELLNGPATVCGPKLSTTLVKDKCVNFNFNGLTGTGVLTTSKKQFLPFQQFGRDISDTTDAVRDPQTLEILDITPCSFGGVSVITPGTNTSNQVAVLYQDVNCTEVPMAIHAEQLTPAWRVYSAGANVFQTRAGCLVGAEHVNNSYECDIPVGAGICASYHSMSSLRSVNQRSIIAYTMSLGAENSVAYSNNSIAIPTNFTISVTTEILPVSMTKTSVDCTMYICGDSIECSNLLLQYGSFCTQLNRALTGIAVEQDKNTQEVFAQVKQIYKTPPIKDFGGFNFSQILPDPSKPSKRSFIEDLLFNKVTLADAGFIKQYGDCLGDIAARDLICAQKFNGLTVLPPLLTDEMIAQYTSALLAGTITSGWTFGAGAALQIPFAMQMAYRFNGIGVTQNVLYENQKLIANQFNSAIGKIQDSLSSTASALGKLQDVVNQNAQALNTLVKQLSSNFGAISSVLNDILSRLDPPEAEVQIDRLITGRLQSLQTYVTQQLIRAAEIRASANLAATKMSECVLGQSKRVDFCGKGYHLMSFPQSAPHGVVFLHVTYVPAQEKNFTTAPAICHEGKAHFPREGVFVSNGTHWFITQRNFYEPQIITTDNTFVSGSCDVVIGIVNNTVYDPLQPELDSFKEELDKYFKNHTSPDVDLGDISGINASVVNIQKEIDRLNEVAKNLNESLIDLQELGKYEQGSGYIPEAPRDGQAYVRKDGEWVLLSTFLGRSLEVLFQGPGHHHHHHHHSAWSHPQFEKGGGSGGGGSGGSAWSHPQFEK

SEQ ID NO: 155 - protein, 1282 aa, Artificial Sequence
  Description of Artificial Sequence: Synthetic polypeptide
MFVFLFVLPLVSSQCVNLTTRTGIPPGYTNSSTRGVYYPDKVFRSSILHLTQDLFLPFFSNVTWFNTINYQGGFKKFDNPVLPFNDGVYFASTEKSNIIRGWIFGTTLDARTQSLLIVNNATNVVIKVCEFQFCTDPFLGVYYHNNNKTWVENEFRVYSSANNCTFEYISQPFLMDLEGKQGNFKNLREFVFKNVDGYFKIYSKHTPIDLVRDLPRGFAALEPLVDLPIGINITRFQTLLALHRSYLTPGNLESGWTTGAAAYYVGYLQQRTFLLSYNQNGTITDAVDCSLDPLSETKCTLKSLTVEKGIYQTSNFRVQPTISIVRFPNITNLCPFGEVFNASKFASVYAWNRKRISNCVADYSVLYNSTSFSTFKCYGVSPTKLNDLCFTNVYADSFVVKGDEVRQIAPGQTGVIADYNYKLPDDFTGCVIAWNSVKQDALTGGNYGYLYRLFRKSKLKPFERDISTEIYQAGSTPCNGQVGLNCYYPLERYGFHPTTGVNYQPFRVVVLSFELLNGPATVCGPKLSTTLVKDKCVNFNFNGLTGTGVLTTSKKQFLPFQQFGRDISDTTDAVRDPQTLEILDITPCSFGGVSVITPGTNTSNQVAVLYQDVNCTEVPMAIHAEQLTPAWRVYSAGANVFQTRAGCLVGAEHVNNSYECDIPVGAGICASYHSMSSLRSVNQRSIIAYTMSLGAENSVAYSNNSIAIPTNFTISVTTEILPVSMTKTSVDCTMYICGDSIECSNLLLQYGSFCTQLNRALTGIAVEQDKNTQEVFAQVKQIYKTPPIKDFGGFNFSQILPDPSKPSKRSFIEDLLFNKVTLADAGFIKQYGDCLGDIAARDLICAQKFNGLTVLPPLLTDEMIAQYTSALLAGTITSGWTFGAGAALQIPFAMQMAYRFNGIGVTQNVLYENQKLIANQFNSAIGKIQDSLSSTASALGKLQDVVNQNAQALNTLVKQLSSNFGAISSVLNDILSRLDPPEAEVQIDRLITGRLQSLQTYVTQQLIRAAEIRASANLAATKMSECVLGQSKRVDFCGKGYHLMSFPQSAPHGVVFLHVTYVPAQEKNFTTAPAICHEGKAHFPREGVFVSNGTHWFITQRNFYEPQIITTDNTFVSGSCDVVIGIVNNTVYDPLQPELDSFKEELDKYFKNHTSPDVDLGDISGINASVVNIQKEIDRLNEVAKNLNESPIDLQELGKYEQGSGYIPEAPRDGQAYVRKDGEWVLLSTFLGRSLEVLFQGPGHHHHHHHHSAWSHPQFEKGGGSGGGGSGGSAWSHPQFEK

SEQ ID NO: 156 - protein, 1271 aa, Artificial Sequence
  Description of Artificial Sequence: Synthetic polypeptide
MKLLVLVFATLVSSYTIEKCLDFDDRTPPANTQFLSSHRGVYYPDDIFRSNVLHLVQDHFLPFDSNVTRFITFGLNFDNPIIPFRDGIYFAATEKSNVIRGWVFGSTMNNKSQSVIIMNNSTNLVIRACNFELCDNPFFVVLKSNNTQIPSYIFNNAFNCTFEYVSKDFNLDLGEKPGNFKDLREFVFRNKDGFLHVYSGYQPISAASGLPTGFNALKPIFKLPLGINITNFRTLLTAFPPRPDYWGTSAAAYFVGYLKPTTFMLKYDENGTITDAVDCSQNPLAELKCSVKSFEIDKGIYQTSNFRVAPSKEVVRFPNITNLCPFGEVFNATTFPSVYAWERKRISNCVADYSVLYNSTSFSTFKCYGVSATKLNDLCFSNVYADSFVVKGDDVRQIAPGQTGVIADYNYKLPDDFLGCVLAWNTNSKDSSTSGNYNYLYRWVRRSKLNPYERDLSNDIYSPGGQSCSAVGPNCYNPLRPYGFFTTAGVGHQPYRVVVLSFELLNAPATVCGPKLSTDLIKNQCVNFNFNGLTGTGVLTPSSKRFQPFQQFGRDVSDFTDSVRDPKTSEILDISPCSFGGVSVITPGTNTSSEVAVLYQDVNCTDVPVAIHADQLTPSWRVYSTGNNVFQTQAGCLIGAEHVDTSYECDIPIGAGICASYHTVSSLRSTSQKSIVAYTMSLGADSSIAYSNNTIAIPTNFSISITTEVMPVSMAKTSVDCNMYICGDSTECANLLLQYGSFCTQLNRALSGIAVEQDRNTREVFAQVKQMYKTPTLKDFGGFNFSQILPDPLKPTKRSFIEDLLFNKVTLADAGFMKQYGECLGDINARDLICAQKFNGLTVLPPLLTDDMIAAYTAALVSGTATAGWTFGAGAALQIPFAMQMAYRFNGIGVTQNVLYENQKQIANQFNKAISQIQESLTTTSTALGKLQDVVNQNAQALNTLVKQLSSNFGAISSVLNDILSRLDPPEAEVQIDRLITGRLQSLQTYVTQQLIRAAEIRASANLAATKMSECVLGQSKRVDFCGKGYHLMSFPQAAPHGVVFLHVTYVPSQERNFTTAPAICHEGKAYFPREGVFVFNGTSWFITQRNFFSPQIITTDNTFVSGSCDVVIGIINNTVYDPLQPELDSFKEELDKYFKNHTSPDVDLGDISGINASVVNIQKEIDRLNEVAKNLNESLIDLQELGKYEQGSGYIPEAPRDGQAYVRKDGEWVLLSTFLGRSLEVLFQGPGHHHHHHHHSAWSHPQFEKGGGSGGGGSGGSAWSHPQFEK

SEQ ID NO: 157 - protein, 1284 aa, Artificial Sequence
  Description of Artificial Sequence: Synthetic polypeptide
MFVFLVLLPLVSSQCVNLTTRTQLPPAYTNSSTRGVYYPDKVFRSSVLHLTQDLFLPFFSNVTWFHAIHVSGTNGIKRFDNPVLPFNDGVYFASTEKSNIIRGWIFGTTLDSKTQSLLIVNNATNVVIKVCEFQFCNDPFLGVYYHKNNKSWMESEFRVYSSANNCTFEYVSQPFLMDLEGKQGNFKNLREFVFKNIDGYFKIYSKHTPINLVRDLPPGFSALEPLVDLPIGINITRFQTLLALHRSYLTPGDSSSGWTAGAAAYYVGYLQPRTFLLKYNENGTITDAVDCALDPLSETKCTLKSFTVEKGIYQTSNFRVQPTDSIVRFPNITNLCPFGEVFNATTFASVYAWNRKRISNCVADYSVLYNSTSFSTFKCYGVSPTKLNDLCFTNVYADSFVITGDEVRQIAPGQTGKIADYNYKLPDDFTGCVIAWNSKHIDAKEGGNFNYLYRLFRKANLKPFERDISTEIYQAGSKPCNGQTGLNCYYPLYRYGFYPTDGVGHQPYRVVVLSFELLNAPATVCGPKKSTNLVKNKCVNFNFNGLTGTGVLTESNKKFLPFQQFGRDIADTTDAVRDPQTLEILDITPCSFGGVSVITPGTNASNQVAVLYQDVNCTEVPVAIHADQLTPTWRVYSTGSNVFQTRAGCLIGAEHVNNSYECDIPIGAGICASYQTQTNSRSVASQSIIAYTMSLGAENSVAYSNNSIAIPTNFTISVTTEILPVSMTKTSVDCTMYICGDSTECSNLLLQYGSFCTQLNRALTGIAVEQDKNTQEVFAQVKQIYKTPPIKDFGGFNFSQILPDPSKPSKRSFIEDLLFNKVTLADAGFIKQYGDCLGDIAARDLICAQKFNGLTVLPPLLTDEMIAQYTSALLAGTITSGWTFGAGAALQIPFAMQMAYRFNGIGVTQNVLYENQKLIANQFNSAIGKIQDSLSSTASALGKLQDVVNQNAQALNTLVKQLSSNFGAISSVLNDILSRLDPPEAEVQIDRLITGRLQSLQTYVTQQLIRAAEIRASANLAATKMSECVLGQSKRVDFCGKGYHLMSFPQSAPHGVVFLHVTYVPAQEKNFTTAPAICHDGKAHFPREGVFVSNGTHWFVTQRNFYEPQIITTDNTFVSGSCDVVIGIVNNTVYDPLQPELDSFKEELDKYFKNHTSPDVDLGDISGINASVVNIQKEIDRLNEVAKNLNESLIDLQELGKYEQGSGYIPEAPRDGQAYVRKDGEWVLLSTFLGRSLEVLFQGPGHHHHHHHHSAWSHPQFEKGGGSGGGGSGGSAWSHPQFEK

SEQ ID NO: 158 - protein, 1257 aa, Artificial Sequence
  Description of Artificial Sequence: Synthetic polypeptide
MKILIFAFLANLAKAQEGCGIISRKPQPKMAQVSSSRRGVYYNDDIFRSDVLHLTQDYFLPFDSNLTQYFSLNVDSDRYTYFDNPILDFGDGVYFAATEKSNVIRGWIFGSSFDNTTQSAVIVNNSTHIIIRVCNFNLCKEPMYTVSRGTQQNAWVYQSAFNCTYDRVEKSFQLDTTPKTGNFKDLREYVFKNRDGFLSVYQTYTAVNLPRGLPTGFSVLKPILKLPFGINITSYRVVMAMFSQTTSNFLPESAAYYVGNLKYSTFMLRFNENGTITDAVDCSQNPLAELKCTIKNFNVDKGIYQTSNFRVSPTQEVIRFPNITNRCPFDKVFNATRFPNVYAWERTKISDCVADYTVLYNSTSFSTFKCYGVSPSKLIDLCFTSVYADTFLIRSSEVRQVAPGETGVIADYNYKLPDDFTGCVIAWNTAKHDTGNYYYRSHRKTKLKPFERDLSSDDGNGVYTLSTYDFNPNVPVAYQATRVVVLSFELLNAPATVCGPKLSTELVKNQCVNFNFNGLKGTGVLTSSSKRFQSFQQFGRDTSDFTDSVRDPQTLEILDISPCSFGGVSVITPGTNASSEVAVLYQDVNCTDVPTAIRADQLTPAWRVYSTGVNVFQTQAGCLIGAEHVNASYECDIPIGAGICASYHTASVLRSTGQKSIVAYTMSLGAENSIAYANNSIAIPTNFSISVTTEVMPVSMAKTAVDCTMYICGDSLECSNLLLQYGSFCTQLNRALTGIAIEQDKNTQEVFAQVKQMYKTPAIKDFGGFNFSQILPDPSKPTKRSFIEDLLFNKVTLADAGFMKQYGDCLGDVSARDLICAQKFNGLTVLPPLLTDEMVAAYTAALVSGTATAGWTFGAGAALQIPFAMQMAYRFNGIGVTQNVLYENQKLIANQFNSAIGKIQESLSSTASALGKLQDVVNQNAQALNTLVKQLSSNFGAISSVLNDILSRLDPPEAEVQIDRLITGRLQSLQTYVTQQLIRAAEIRASANLAATKMSECVLGQSKRVDFCGKGYHLMSFPQSAPHGVVFLHVTYVPSQEKNFTTAPAICHEGKAYFPREGVFVSNGTSWFITQRNFYSPQLITTDNTFVSGNCDVVIGIINNTVYDPLQPELDSFKEELDKYFKNHTSPDVDLGDISGINASVVNIQKEIDRLNEVAKNLNESLIDLQELGKYEQGSGYIPEAPRDGQAYVRKDGEWVLLSTFLGRSLEVLFQGPGHHHHHHHHSAWSHPQFEKGGGSGGGGSGGSAWSHPQFEK

SEQ ID NO: 159 - protein, 1371 aa, Artificial Sequence
  Description of Artificial Sequence: Synthetic polypeptide
MIHSVFLLMFLLTPTESYVDVGPDSVKSACIEVDIQQTFFDKTWPRPIDVSKADGIIYPQGRTYSNITITYQGLFPYQGDHGDMYVYSAGHATGTTPQKLFVANYSQDVKQFANGFVVRIGAAANSTGTVIISPSTSATIRKIYPAFMLGSSVGNFSDGKMGRFFNHTLVLLPDGCGTLLRAFYCILEPRSGNHCPAGNSYTSFATYHTPATDCSDGNYNRNASLNSFKEYFNLRNCTFMYTYNITEDEILEWFGITQTAQGVHLFSSRYVDLYGGNMFQFATLPVYDTIKYYSIIPHSIRSIQSDRKAWAAFYVYKLQPLTFLLDFSVDGYIRRAIDCGFNDLSQLHCSYESFDVESGVYSVSSFEAKPSGSVVEQAEGVECDFSPLLSGTPPQVYNFKRLVFTNCNYNLTKLLSLFSVNDFTCSQISPAAIASNCYSSLILDYFSYPLSMKSDLSVSSAGPISQFNYKQSFSNPTCLILATVPHNLTTITKPLKYSYINKCSRLLSDDRTEVPQLVNANQYSPCVSIVPSTVWEDGDYYRKQLSPLEGGGWLVASGSTVAMTEQLQMGFGITVQYGTDTNSVCPKLEFANDTKIASQLGNCVEYSLYGVSGRGVFQNCTAVGVRQQRFVYDAYQNLVGYYSDDGNYYCLRACVSVPVSVIYDKETKTHATLFGSVACEHISSTMSQYSRSTRSMLKRRDSTYGPLQTPVGCVLGLVNSSLFVEDCKLPLGQSLCALPDTPSTLTPASVGSVPGEMRLASIAFNHPIQVDQLNSSYFKLSIPTNFSFGVTQEYIQTTIQKVTVDCKQYVCNGFQKCEQLLREYGQFCSKINQALHGANLRQDDSVRNLFASVKSSQSSPIIPGFGGDFNLTLLEPVSISTGSRSARSAIEDLLFDKVTIADPGYMQGYDDCMQQGPASARDLICAQYVAGYKVLPPLMDVNMEAAYTSSLLGSIAGVGWTAGLSSFAAIPFAQSIFYRLNGVGITQQVLSENQKLIANKFNQALGAMQTGFTTTNEAFQKVQDAVNNNAQALSKLASELSNTFGAISASIGDIIQRLDPPEQDAQIDRLINGRLTTLNAFVAQQLVRSESAALSAQLAKDKVNECVKAQSKRSGFCGQGTHIVSFVVNAPNGLYFMHVGYYPSNHIEVVSAYGLCDAANPTNCIAPVNGYFIKTNNTRIVDEWSYTGSSFYAPEPITSLNTKYVAPQVTYQNISTNLPPPLLGNSTGIDFQDELDEFFKNVSTSIPNFGSLTQINTTLLDLTYEMLSLQQVVKALNESYIDLKELGNYTYGSGYIPEAPRDGQAYVRKDGEWVLLSTFLGRSLEVLFQGPGHHHHHHHHSAWSHPQFEKGGGSGGGGSGGSAWSHPQFEK

SEQ ID NO: 160 - protein, 1358 aa, Artificial Sequence
  Description of Artificial Sequence: Synthetic polypeptide
MFLILLISLPTAFAVIGDLKCTSDNINDKDTGPPPISTDTVDVTNGLGTYYVLDRVYLNTTLFLNGYYPTSGSTYRNMALKGSVLLSRLWFKPPFLSDFINGIFAKVKNTKVIKDRVMYSEFPAITIGSTFVNTSYSVVVQPRTINSTQDGDNKLQGLLEVSVCQYNMCEYPQTICHPNLGNHRKELWHLDTGVVSCLYKRNFTYDVNADYLYFHFYQEGGTFYAYFTDTGVVTKFLFNVYLGMALSHYYVMPLTCNSKLTLEYWVTPLTSRQYLLAFNQDGIIFNAVDCMSDFMSEIKCKTQSIAPPTGVYELNGYTVQPIADVYRRKPNLPNCNIEAWLNDKSVPSPLNWERKTFSNCNFNMSSLMSFIQADSFTCNNIDAAKIYGMCFSSITIDKFAIPNGRKVDLQLGNLGYLQSFNYRIDTTATSCQLYYNLPAANVSVSRFNPSTWNKRFGFIEDSVFKPRPAGVLTNHDVVYAQHCFKAPKNFCPCKLNGSCVGSGPGKNNGIGTCPAGTNYLTCDNLCTPDPITFTGTYKCPQTKSLVGIGEHCSGLAVKSDYCGGNSCTCRPQAFLGWSADSCLQGDKCNIFANFILHDVNSGLTCSTDLQKANTDIILGVCVNYDLYGILGQGIFVEVNATYYNSWQNLLYDSNGNLYGFRDYITNRTFMIRSCYSGRVSAAFHANSSEPALLFRNIKCNYVFNNSLTRQLQPINYFDSYLGCVVNAYNSTAISVQTCDLTVGSGYCVDYSKNGGSGGAITTGYRFTNFEPFTVNSVNDSLEPVGGLYEIQIPSEFTIGNMVEFIQTSSPKVTIDCAAFVCGDYAACKSQLVEYGSFCDNINAILTEVNELLDTTQLQVANSLMNGVTLSTKLKDGVNFNVDDINFSPVLGCLGSECSKASSRSAIEDLLFDKVKLSDVGFVEAYNNCTGGAEIRDLICVQSYKGIKVLPPLLSENQISGYTLAATSASLFPPWTAAAGVPFYLNVQYRINGLGVTMDVLSQNQKLIANAFNNALYAIQEGFDATNSALVKIQAVVNANAEALNNLLQQLSNRFGAISASLQEILSRLDPPEAEAQIDRLINGRLTALNAYVSQQLSDSTLVKFSAAQAMEKVNECVKSQSSRINFCGNGNHIISLVQNAPYGLYFIHFSYVPTKYVTARVSPGLCIAGDRGIAPKSGYFVNVNNTWMYTGSGYYYPEPITENNVVVMSTCAVNYTKAPYVMLNTSIPNLPDFKEELDQWFKNQTSVAPDLSLDYINVTFLDLQVEMNRLQEAIKVLNGSGYIPEAPRDGQAYVRKDGEWVLLSTFLGRSLEVLFQGPGHHHHHHHHSAWSHPQFEKGGGSGGGGSGGSAWSHPQFEK

SEQ ID NO: 161 - protein, 1361 aa, Artificial Sequence
  Description of Artificial Sequence: Synthetic polypeptide
MLLIIFILPTTLAVIGDFNCTNFAINDLNTTVPRISEYVVDVSYGLGTYYILDRVYLNTTILFTGYFPKSGANFRDLSLKGTTYLSTLWYQKPFLSDFNNGIFSRVKNTKLYVNKTLYSEFSTIVIGSVFINNSYTIVVQPHNGVLEITACQYTMCEYPHTICKSKGSSRNESWHFDKSEPLCLFKKNFTYNVSTDWLYFHFYQERGTFYAYYADSGMPTTFLFSLYLGTLLSHYYVLPLTCNAISSNTDNETLQYWVTPLSKRQYLLKFDNRGVITNAVDCSSSFFSEIQCKTKSLLPNTGVYDLSGFTVKPVATVHRRIPDLPDCDIDKWLNNFNVPSPLNWERKIFSNCNFNLSTLLRLVHTDSFSCNNFDESKIYGSCFKSIVLDKFAIPNSRRSDLQLGSSGFLQSSNYKIDTTSSSCQLYYSLPAINVTINNYNPSSWNRRYGFNNFNLSSHSVVYSRYCFSVNNTFCPCAKPSFASSCKSHKPPSASCPIGTNYRSCESTTVLDHTDWCRCSCLPDPITAYDPRSCSQKKSLVGVGEHCAGFGVDEEKCGVLDGSYNVSCLCSTDAFLGWSYDTCVSNNRCNIFSNFILNGINSGTTCSNDLLQPNTEVFTDVCVDYDLYGITGQGIFKEVSAVYYNSWQNLLYDSNGNIIGFKDFVTNKTYNIFPCYAGRVSAAFHQNASSLALLYRNLKCSYVLNNISLTTQPYFDSYLGCVFNADNLTDYSVSSCALRMGSGFCVDYNSPSSSSSGGSGSSISASYRFVTFEPFNVSFVNDSIESVGGLYEIKIPTNFTIVGQEEFIQTNSPKVTIDCSLFVCSNYAACHDLLSEYGTFCDNINSILDEVNGLLDTTQLHVADTLMQGVTLSSNLNTNLHFDVDNINFKSLVGCLGPHCGSSSRSFFEDLLFDKVKLSDVGFVEAYNNCTGGSEIRDLLCVQSFNGIKVLPPILSESQISGYTTAATVAAMFPPWSAAAGIPFSLNVQYRINGLGVTMDVLNKNQKLIATAFNNALLSIQNGFSATNSALAKIQSVVNSNAQALNSLLQQLFNKFGAISSSLQEILSRLDPPEAQVQIDRLINGRLTALNAYVSQQLSDISLVKFGAALAMEKVNECVKSQSPRINFCGNGNHILSLVQNAPYGLLFMHFSYKPISFKTVLVSPGLCISGDVGIAPKQGYFIKHNDHWMFTGSSYYYPEPISDKNVVFMNTCSVNFTKAPLVYLNHSVPKLSDFESELSHWFKNQTSIAPNLTLNLHTINATFLDLYYEMNLIQESIKSLNGSGYIPEAPRDGQAYVRKDGEWVLLSTFLGRSLEVLFQGPGHHHHHHHHSAWSHPQFEKGGGSGGGGSGGSAWSHPQFEK

SEQ ID NO: 162 - protein, 1352 aa, Artificial Sequence
  Description of Artificial Sequence: Synthetic polypeptide
MLLIIFILPTTLAVIGDFNCTNSFINDYNKTIPRISEDVVDVSLGLGTYYVLNRVYLNTTLLFTGYFPKSGANFRDLALKGSIYLSTLWYKPPFLSDFNNGIFSKVKNTKLYVNNTLYSEFSTIVIGSVFVNTSYTIVVQPHNGILEITACQYTMCEYPHTVCKSKGSIRNESWHIDSSEPLCLFKKNFTYNVSADWLYFHFYQERGVFYAYYADVGMPTTFLFSLYLGTILSHYYVMPLTCNAISSNTDNETLEYWVTPLSRRQYLLNFDEHGVITNAVDCSSSFLSEIQCKTQSFAPNTGVYDLSGFTVKPVATVYRRIPNLPDCDIDNWLNNVSVPSPLNWERRIFSNCNFNLSTLLRLVHVDSFSCNNLDKSKIFGSCFNSITVDKFAIPNRRRDDLQLGSSGFLQSSNYKIDISSSSCQLYYSLPLVNVTINNFNPSSWNRRYGFGSFNLSSYDVVYSDHCFSVNSDFCPCADPSVVNSCAKSKPPSAICPAGTKYRHCDLDTTLYVKNWCRCSCLPDPISTYSPNTCPQKKVVVGIGEHCPGLGINEEKCGTQLNHSSCFCSPDAFLGWSFDSCISNNRCNIFSNFIFNGINSGTTCSNDLLYSNTEISTGVCVNYDLYGITGQGIFKEVSAAYYNNWQNLLYDSNGNIIGFKDFLTNKTYTILPCYSGRVSAAFYQNSSSPALLYRNLKCSYVLNNISFISQPFYFDSYLGCVLNAVNLTSYSVSSCDLRMGSGFCIDYALPSSGGSGSGISSPYRFVTFEPFNVSFVNDSVETVGGLFEIQIPTNFTIAGHEEFIQTSSPKVTIDCSAFVCSNYAACHDLLSEYGTFCDNINSILNEVNDLLDITQLQVANALMQGVTLSSNLNTNLHSDVDNIDFKSLLGCLGSQCGSSSRSLLEDLLFNKVKLSDVGFVEAYNNCTGGSEIRDLLCVQSFNGIKVLPPILSETQISGYTTAATVAAMFPPWSAAAGVPFSLNVQYRINGLGVTMDVLNKNQKLIANAFNKALLSIQNGFTATNSALAKIQSVVNANAQALNSLLQQLFNKFGAISSSLQEILSRLDNLEAQVQIDRLINGRLTALNAYVSQQLSDITLIKAGASRAIEKVNECVKSQSPRINFCGNGNHILSLVQNAPYGLLFIHFSYKPTSFKTVLVSPGLCLSGDRGIAPKQGYFIKQNDSWMFTGSSYYYPEPISDKNVVFMNSCSVNFTKAPFIYLNNSIPNLSDFEAELSLWFKNHTSIAPNLTFNSHINATFLDLYYEMNVIQESIKSLNGSGYIPEAPRDGQAYVRKDGEWVLLSTFLEVLFQGPGHHHHHHHHSAWSHPQFEKGGGSGGGGSGGSAWSHPQFEK

SEQ ID NO: 163 - protein, 1190 aa, Artificial Sequence
  Description of Artificial Sequence: Synthetic polypeptide
MFVLLVAYALLHIAGCQTTNGLNTSYSVCNGCVGYSENVFAVESGGYIPSDFAFNNWFLLTNTSSVVDGVVRSFQPLLLNCLWSVSGLRFTTGFVYFNGTGRGDCKGFSSDVLSDVIRYNLNFEENLRRGTILFKTSYGVVVFYCTNNTLVSGDAHIPFGTVLGNFYCFVNTTIGNETTSAFVGALPKTVREFVISRTGHFYINGYRYFTLGNVEAVNFNVTTAETTDFCTVALASYADVLVNVSQTSIANIIYCNSVINRLRCDQLSFDVPDGFYSTSPIQSVELPVSIVSLPVYHKHTFIVLYVDFKPQSGGGKCFNCYPAGVNITLANFNETKGPLCVDTSHFTTKYVAVYANVGRWSASINTGNCPFSFGKVNNFVKFGSVCFSLKDIPGGCAMPIVANWAYSKYYTIGSLYVSWSDGDGITGVPQPVEGVSSFMNVTLDKCTKYNIYDVSGVGVIRVSNDTFLNGITYTSTSGNLLGFKDVTKGTIYSITPCNPPDQLVVYQQAVVGAMLSENFTSYGFSNVVELPKFFYASNGTYNCTDAVLTYSSFGVCADGSIIAVQPRNVSYDSVSAIVTANLSIPSNWTTSVQVEYLQITSTPIVVDCSTYVCNGNVRCVELLKQYTSACKTIEDALRNSARLESADVSEMLTFDKKAFTLANVSSFGDYNLSSVIPSLPTSGSRVAGRSAIEDILFSKLVTSGLGTVDADYKKCTKGLSIADLACAQYYNGIMVLPGVADAERMAMYTGSLIGGIALGGLTSAVSIPFSLAIQARLNYVALQTDVLQENQKILAASFNKAMTNIVDAFTGVNDAITQTSQALQTVATALNKIQDVVNQQGNSLNHLTSQLRQNFQAISSSIQAIYDRLDPPQADQQVDRLITGRLAALNVFVSHTLTKYTEVRASRQLAQQKVNECVKSQSKRYGFCGNGTHIFSIVNAAPEGLVFLHTVLLPTQYKDVEAWSGLCVDGTNGYVLRQPNLALYKEGNYYRITSRIMFEPRIPTMADFVQIENCNVTFVNISRSELQTIVPEYIDVNKTLQELSYKLPNYTVPDLVVEQYNQTILNLTSEISTLENKSAELNYTVQKLQTLIDNINSTLVDLKWLNRVETGSGYIPEAPRDGQAYVRKDGEWVLLSTFLGRSLEVLFQGPGHHHHHHHHSAWSHPQFEKGGGSGGGGSGGSAWSHPQFEK

SEQ ID NO: 164 - protein, 1371 aa, Artificial Sequence
  Description of Artificial Sequence: Synthetic polypeptide
MKLFLILLVLPLASCFFTCNSNANLSMLQLGVPDNSSTIVTGLLPTHWFCANQSTSVYSANGFFYIDVGNHRSAFALHTGYYDANQYYIYVTNEIGLNASVTLKICKFSRNTTFDFLSNASSSFDCIVNLLFTEQLGAPLGITISGETVRLHLYNVTRTFYVPAAYKLTKLSVKCYFNYSCVFSVVNATVTVNVTTHNGRVVNYTVCDDCNGYTDNIFSVQQDGRIPNGFPFNNWFLLTNGSTLVDGVSRLYQPLRLTCLWPVPGLKSSTGFVYFNATGSDVNCNGYQHNSVVDVMRYNLNFSANSLDNLKSGVIVFKTLQYDVLFYCSNSSSGVLDTTIPFGPSSQPYYCFINSTINTTHVSTFVGILPPTVREIVVARTGQFYINGFKYFDLGFIEAVNFNVTTASATDFWTVAFATFVDVLVNVSATNIQNLLYCDSPFEKLQCEHLQFGLQDGFYSANFLDDNVLPETYVALPIYYQHTDINFTATASFGGSCYVCKPHQVNISLNGNTSVCVRTSHFSIRYIYNRVKSGSPGDSSWHIYLKSGTCPFSFSKLNNFQKFKTICFSTVEVPGSCNFPLEATWHYTSYTIVGALYVTWSEGNSITGVPYPVSGIREFSNLVLNNCTKYNIYDYVGTGIIRSSNQSLAGGITYVSNSGNLLGFKNVSTGNIFIVTPCNQPDQVAVYQQSIIGAMTAVNESRYGLQNLLQLPNFYYVSNGGNNCTTAVMTYSNFGICADGSLIPVRPRNSSDNGISAIITANLSIPSNWTTSVQVEYLQITSTPIVVDCATYVCNGNPRCKNLLKQYTSACKTIEDALRLSAHLETNDVSSMLTFDSNAFSLANVTSFGDYNLSSVLPQGNIGSSRIAGRSALEDLLFSKVVTSGLGTVDVDYKSCTKGLSIADLACAQYYNGIMVLPGVADAERMAMYTGSLIGGMVLGGLTSAAAIPFSLALQARLNYVALQTDVLQENQKILAASFNKAINNIVASFSSVNDAITQTAEAIHTVTIALNKIQDVVNQQGSALNHLTSQLRHNFQAISNSIQAIYDRLDPPQADQQVDRLITGRLAALNAFVSQVLNKYTEVRGSRRLAQQKINECVKSQSNRYGFCGNGTHIFSIVNSAPDGLLFLHTVLLPTDYKNVKAWSGICVDGIYGYVLRQPNLVLYSDNGVFRVTSRVMFQPRLPVLSDFVQIYNCNVTFVNISRVELHTVIPDYVDVNKTLQEFAQNLPKYVKPNFDLTPFNLTYLNLSSELKQLEAKTASLFQTTVELQGLIDQINSTYVDLKLLNRFENGSGYIPEAPRDGQAYVRKDGEWVLLSTFLGRSLEVLFQGPGHHHHHHHHSAWSHPQFEKGGGSGGGGSGGSAWSHPQFEK

SEQ ID NO: 165 - protein, 229 aa, Artificial Sequence
  Description of Artificial Sequence: Synthetic polypeptide
MGWSCIILFLVATATGVHASFFAHTTVNITIDLGMKRSGYGQPIASPLSNITLPMQDNNTDVYCIRSNQFSIYVHSTCKSSLWDNVFNQDCTDVLEATAVIKTGTCPFSFDKLNNHLTFNKFCLSLSPVGANCKFDVAARTRTNEQVVRSLYVIYEEGDNIVGVPSDNSGLHDLSLPETGGLEVLFQGPGHHHHHHHHSAWSHPQFEKGGGSGGGGSGGSAWSHPQFEK

SEQ ID NO: 166 - protein, 1397 aa, Artificial Sequence
  Description of Artificial Sequence: Synthetic polypeptide
MKLLFVVLVVLPSIYGDNFPCSKFLNRTIGNHWNLIENFLLNYSIRLPPNSDVVLGDYFPTVQPWFNCIRNNNNSLYVTMENLKALYWDYATENITSDHRQRLHVVVKGKPYSITVTTTRNFDAAEGAIICICKGSPPTTTTGNLDCNWGSDCRLNHKFPICPSNSQANCGNMLYGLQWFTDEVVAYLHGAIYRISFENKWFGTVTLGDMRATTLQTAGALVDLWWFNPVYDVTYYRVNNKNGTTIVSNCTDQCASYVDNVFTTQPGGLIPSDFSFNNWFLLTNSSTVVSGKLVTRQPLVVNCLWPVPSFKEAASTFCFEGAGFDQCNGAVLNNTVDVIRFNLNFTADVQSGMGATVFSLNTTGGVILEISCYNDIVSESSFYSYGDIPFGITDGPRYCYVLYNGTTLKYLGTLPPSVKEIAISKWGHFYINGYNFFSTFPIDCISFNLTTGASGAFWTIAYTSYTEALVQVENTAIKKVTYCNSHINNIKCSQLTANLQNGFYPVASSEVGLVNKSVVLLPSFFAHTTVNITIDLGMKRSGYGQPIASPLSNITLPMQDNNTDVYCIRSNQFSIYVHSTCKSSLWDNVFNQDCTDVLEATAVIKTGTCPFSFDKLNNHLTFNKFCLSLSPVGANCKFDVAARTRTNEQVVRSLYVIYEEGDNIVGVPSDNSGLHDLSVLHLDSCTDYNIYGRTGVGVIRQTNSTLLSGLYYTSLSGDLLGFKNVSDGVIYSVTPCDVSAQAAVIDGAIVGAMTSINSELLGLTHWTTTPNFYYYSIYNYTNERTRGTAIDSNDVDCEPIITYSNIGVCKNGALVFINVTHSDGDVQPISTGNVTIPTNFTISVQVEYIQVYTTPVSIDCARYVCNGNPRCNKLLTQYVSACQTIEQALAMGARLENMEVDSMLFVSENALKLASVEAFNSTENLDPIYKEWPNIGGSWLGGLKDILPSHNSKRKYRSAIEDLLFDKVVTSGLGTVDEDYKRCTGGYDIADLVCAQYYNGIMVLPGVANDDKMTMYTASLAGGITLGALGGGAVAIPFAVAVQARLNYVALQTDVLNKNQQILANAFNQAIGNITQAFGKVNDAIHQTSKGLATVAKVLAKVQDVVNTQGQALSHLTVQLQNNFQAISSSISDIYNRLDPPSADAQVDRLITGRLTALNAFVSQTLTRQAEVRASRQLAKDKVNECVRSQSQRFGFCGNGTHLFSLANAAPNGMIFFHTVLLPTAYQTVTACSGICASDGDRTFGLVVKDVQLTLFRNLDDKFYLTPRTMYQPRAATSSDFVQIEGCDVLFVNATEIDLPSIIPDYIDINQGSGYIPEAPRDGQAYVRKDGEWVLLSTFLGRSLPETGGLEVLFQGPGHHHHHHHHSAWSHPQFEKGGGSGGGGSGGSAWSHPQFEK

SEQ ID NO: 167 - protein, 1397 aa, Artificial Sequence
  Description of Artificial Sequence: Synthetic polypeptide
MKLLFVVLVVLPSIYGDNFPCSKFLNRTIGNHWNLIENFLLNYSIRLPPNSDVVLGDYFPTVQPWFNCIRNNNNSLYVTMENLKALYWDYATENITSDHRQRLHVVVKGKPYSITVTTTRNFDAAEGAIICICKGSPPTTTTGNLDCNWGSDCRLNHKFPICPSNSQANCGNMLYGLQWFTDEVVAYLHGAIYRISFENKWFGTVTLGDMRATTLQTAGALVDLWWFNPVYDVTYYRVNNKNGTTIVSNCTDQCASYVDNVFTTQPGGLIPSDFSFNNWFLLTNSSTVVSGKLVTRQPLVVNCLWPVPSFKEAASTFCFEGAGFDQCNGAVLNNTVDVIRFNLNFTADVQSGMGATVFSLNTTGGVILEISCYNDIVSESSFYSYGDIPFGITDGPRYCYVLYNGTTLKYLGTLPPSVKEIAISKWGHFYINGYNFFSTFPIDCISFNLTTGASGAFWTIAYTSYTEALVQVENTAIKKVTYCNSHINNIKCSQLTANLQNGFYPVASSEVGLVNKSVVLLPSFFAHTTVNITIDLGMKRSGYGQPIASPLSNITLPMQDNNTDVYCIRSNQFSIYVHSTCKSSLWDNVFNQDCTDVLEATAVIKTGTCPFSFDKLNNHLTFNKFCLSLSPVGANCKFDVAARTRTNEQVVRSLYVIYEEGDNIVGVPSDNSGLHDLSVLHLDSCTDYNIYGRTGVGVIRQTNSTLLSGLYYTSLSGDLLGFKNVSDGVIYSVTPCDVSAQAAVIDGAIVGAMTSINSELLGLTHWTTTPNFYYYSIYNYTNERTRGTAIDSNDVDCEPIITYSNIGVCKNGALVFINVTHSDGDVQPISTGNVTIPTNFTISVQVEYIQVYTTPVSIDCARYVCNGNPRCNKLLTQYVSACQTIEQALAMGARLENMEVDSMLFVSENALKLASVEAFNSTENLDPIYKEWPNIGGSWLGGLKDILPSHNSKRKYRSPIEDLLFDKVVTSGLGTVDEDYKRCTGGYDIADLVCAQYYNGIMVLPGVANDDKMTMYTASLAGGITLGAPGGGAVAIPFPVAVQARLNYVALQTDVLNKNQQILANAFNQAIGNITQPFGKVNDAIHQTSKGLATVAKVLAKVQDVVNTQGQALSHLTVQLQNNFQAISSSISDIYNRLDPPSADAQVDRLITGRLTALNAFVSQTLTRQAEVRASRQLAKDKVNECVRSQSQRFGFCGNGTHLFSLANAAPNGMIFFHTVLLPTAYQTVTACSGICASDGDRTFGLVVKDVQLTLFRNLDDKFYLTPRTMYQPRAATSSDFVQIEGCDVLFVNATEIDLPSIIPDYIDINQGSGYIPEAPRDGQAYVRKDGEWVLLSTFLGRSLPETGGLEVLFQGPGHHHHHHHHSAWSHPQFEKGGGSGGGGSGGSAWSHPQFEK

SEQ ID NO: 168 - protein, 229 aa, Artificial Sequence
  Description of Artificial Sequence: Synthetic polypeptide
MGWSCIILFLVATATGVHAKLPELEVVQLNISAHMDFGEARLDSVTINGNTSYCATKPYFRLETNFMCTGCTMNLRTDTCSFDLSAVNNGMSFSQFCLSTESGACEMKIIVTYVWNYLLRQRLYVTAVEGQTHTGTTSVHATDGSGYIPEAPRDGQAYVRKDGEWVLLSTFLGRSLPETGGLEVLFQGPGHHHHHHHHSAWSHPQFEKGGGSGGGGSGGSAWSHPQFEK

SEQ ID NO: 169 - protein, 1106 aa, Artificial Sequence
  Description of Artificial Sequence: Synthetic polypeptide
MQRALLIMTLLCLVRAKFADDLLDLLTFPGAHRFLHKLTSNSSSFYSRANNFDVGVLPGYPTENVNLFSPLTNSTLPINGLHRSYQPLMLNCLTKITNHTLSMYLLPSEIQTYSCGGAMVKYQTHDAVRIILDLTVTDHISVEVVGQRGENYVFVCSEQFNYTTALHNSTFFSLNSELYCFTNNTYLGILPPDLTDFTVYRTGQFYANGYLLGTLPITVNYVRLYRGHLSANSAHFALANLTDTLITLTNTTISQITYCDKSVVDSIACQRSSHEVEDGFYSDPKSAVRARQRTIVTLPKLPELEVVQLNISAHMDFGEARLDSVTINGNTSYCATKPYFRLETNFMCTGCTMNLRTDTCSFDLSAVNNGMSFSQFCLSTESGACEMKIIVTYVWNYLLRQRLYVTAVEGQTHTGTTSVHATDTSSVITDVCTDYTIYGVSGTGIIKPSDLLLHNGIAFTSPTGELYAFKNITTGKTLQVLPCETPSQLIVINNTVVGAITSSNSTENNRFTTTIVTPTFFYSTNATTFNCTKPVLSYGPISVCSDGAIAGTSTLQNTRPSIVSLYDGEVEIPSAFSLSVQTEYLQVQAEQVIVDCPQYVCNGNSRCLQLLAQYTSACSNIEAALHSSAQLDSREIINMFQTSTQSLQLANITNFKGDYNFSSILTTRLGGRSPIEDLLFNKVVTSGLGTVDQDYKACSRDMAIADLVCSQYYNGIMVLPGVVDAEKMAMYTGSLTGAMVFGGPTAAAAIPFPTAVQARLNYVALQTNVLQENQKILAESFNQAVGNISLPLSSVNDAIQQTSEALNTVAIAIKKIQTVVNQQGEALSHLTAQLSNNFQAISTSIQDIYNRLEPPEANQQVDRLITGRLAALNAYVTQLLNQMSQIRQSRLLAQQKINECVKSQSSRYGFCGNGTHIFSLTQTAPNGIFFMHAVLVPNKFTRVNASAGICVDNIKGYSLQPQLILYQFNNSWRVTPRNMYEPRLPRQADFIQLTDCSVTFYNTTAANLPNIIPDIIDVNQGSGYIPEAPRDGQAYVRKDGEWVLLSTFLGRSLPETGGLEVLFQGPGHHHHHHHHSAWSHPQFEKGGGSGGGGSGGSAWSHPQFEK

SEQ ID NO: 170 - protein, 229 aa, Artificial Sequence
  Description of Artificial Sequence: Synthetic polypeptide
MGWSCIILFLVATATGVHAKLPELEVVQLNISAHMDFGEARLDSVTINGNTSYCVTKPYFRLETNFMCTGCTMNLRTDTCSFDLSAVNNGMSFSQFCLSTESGACEMKIIVTYVWNYLLRQRLYVTAVEGQTHTGTTSVHATDGSGYIPEAPRDGQAYVRKDGEWVLLSTFLGRSLPETGGLEVLFQGPGHHHHHHHHSAWSHPQFEKGGGSGGGGSGGSAWSHPQFEK

SEQ ID NO: 171 - protein, 1107 aa, Artificial Sequence
  Description of Artificial Sequence: Synthetic polypeptide
MQRALLIMTLLCLVRAKFADDLLDLLTFPGAHRFLHKLTRNSSSLYSRANNNFDVGVLPGYPTKNVNLFSPLTNSTLPINGLHRSYQPLMLNCLTKITNHTLSMYLLPSEIQTYSCGGAMVKYQTHDAVRIILDLTTTDHISVEVVGQHGENYVFVCSEQFNYTTALHNSTFFSLNSELYCFTNNTYLGILPPDLTDFTVYRTGQFYANGYLLGTLPITVNYVRLYRGHLSANSAHFALANLTDTLITLTNTTISQITYCDKSVVDSIACQRSSHEVEDGFYSDPKSAVRARQRTIVTLPKLPELEVVQLNISAHMDFGEARLDSVTINGNTSYCVTKPYFRLETNFMCTGCTMNLRTDTCSFDLSAVNNGMSFSQFCLSTESGACEMKIIVTYVWNYLLRQRLYVTAVEGQTHTGTTSVHATDTSSVITDVCTDYTIYGVSGTGIIKPSDLLLHNGIAFTSPTGELYAFKNITTGKTLQVLPCETPSQLIVINNTVVGAITSSNSTENNRFTTTIVTPTFFYSTNATTFNCTKPVLSYGPISVCSDGAIAGTSTLQNTRPSIVSLYDGEVEIPSAFSLSVQTEYLQVQAEQVIVDCPQYVCNGNSRCLQLLAQYTSACSNIEAALHSSAQLDSREIINMFQTSTQSLQLANITNFKGDYNFSSILTTRIGGRSPIEDLLFNKVVTSGLGTVDQDYKSCSRDMAIADLVCSQYYNGIMVLPGVVDAEKMAMYTGSLTGAMVFGGPTAAAAIPFPTAVQARLNYVALQTNVLQENQKILAESFNQAVGNISLPLSSVNDAIQQTSEALNTVAIAIKKIQTVVNQQGEALSHLTAQLSNNFQAISTSIQDIYNRLEPPEANQQVDRLITGRLAALNAYVTQLLNQMSQIRQSRLLAQQKINECVKSQSSRYGFCGNGTHIFSLTQTAPNGIFFMHAVLVPNKFTRVNASAGICVDNTRGYSLQPQLILYQFNNSWRVTPRNMYEPRLPRQADFIQLTDCSVTFYNTTAANLPNIIPDIIDVNQGSGYIPEAPRDGQAYVRKDGEWVLLSTFLGRSLPETGGLEVLFQGPGHHHHHHHHSAWSHPQFEKGGGSGGGGSGGSAWSHPQFEK

SEQ ID NO: 172 - protein, 258 aa, Artificial Sequence
  Description of Artificial Sequence: Synthetic polypeptide
MGWSCIILFLVATATGVHATNLCPFDEVFNATRFASVYAWNRKRISNCVADYSVLYNLAPFFTFKCYGVSPTKLNDLCFTNVYADSFVIRGDEVRQIAPGQTGNIADYNYKLPDDFTGCVIAWNSNKLDSKVSGNYNYLYRLFRKSNLKPFERDISTEIYQAGNKPCNGVAGFNCYFPLRSYSFRPTYGVGHQPYRVVVLSFELLHAPATVCGPKKGSLEVLFQGPGSAWSHPQFEKGGGSGGGGSGGSAWSHPQFEK

SEQ ID NO: 173 - protein, 256 aa, Artificial Sequence
  Description of Artificial Sequence: Synthetic polypeptide
MGWSCIILFLVATATGVHATNLCPFDEVFNATRFASVYAWNRKRISNCVADYSVLYNLAPFFTFKCYGVSPTKLNDLCFTNVYADSFVIRGDEVRQIAPGQTGNIADYNYKLPDDFTGCVIAWNSNKLDSKVSGNYNYLYRLFRKSNLKPFERDISTEIYQAGNKPCNGVAGFNCYFPLRSYSFRPTYGVGHQPYRVVVLSFELLHAPATVCGPGSLEVLFQGPGSAWSHPQFEKGGGSGGGGSGGSAWSHPQFEK

SEQ ID NO: 174 - protein, 267 aa, Artificial Sequence
  Description of Artificial Sequence: Synthetic polypeptide
MGWSCIILFLVATATGVHATNLCPFDEVFNATRFASVYAWNRKRISNCVADYSVLYNLAPFFTFKCYGVSPTKLNDLCFTNVYADSFVIRGDEVRQIAPGQTGNIADYNYKLPDDFTGCVIAWNSNKLDSKVSGNYNYLYRLFRKSNLKPFERDISTEIYQAGNKPCNGVAGFNCYFPLRSYSFRPTYGVGHQPYRVVVLSFELLHAPATVCGPKKGSGLPETGGGSLEVLFQGPGSAWSHPQFEKGGGSGGGGSGGSAWSHPQFEK

SEQ ID NO: 175 - protein, 265 aa, Artificial Sequence
  Description of Artificial Sequence: Synthetic polypeptide
MGWSCIILFLVATATGVHATNLCPFDEVFNATRFASVYAWNRKRISNCVADYSVLYNLAPFFTFKCYGVSPTKLNDLCFTNVYADSFVIRGDEVRQIAPGQTGNIADYNYKLPDDFTGCVIAWNSNKLDSKVSGNYNYLYRLFRKSNLKPFERDISTEIYQAGNKPCNGVAGFNCYFPLRSYSFRPTYGVGHQPYRVVVLSFELLHAPATVCGPGSGLPETGGGSLEVLFQGPGSAWSHPQFEKGGGSGGGGSGGSAWSHPQFEK

SEQ ID NO: 176 - DNA, 1149 bp, Artificial Sequence
  Description of Artificial Sequence: Synthetic polynucleotide
atggattctaagggcagcagccagaagggctccagactgctgctgcttctggtggtgtccaacctcctgctgcctcaaggtgttctggcccagtgcgtgaacctgaccacaagaacacagctgcctccagcctacaccaacagcttcaccagaggcgtgtactaccccgacaaagtgttccggtctagcgtgctgcactctacccaggacctgttcctgcctttcttcagcaacgtgacctggttccacgccatccacgtgtccggcaccaatggcaccaagagattcgacaaccccgtgctgcctttcaacgacggggtgtactttgccagcaccgagaagtccaacatcatcagaggctggatcttcggcaccacactggacagcaagacccagagcctgctgatcgtgaacaacgccaccaacgtggtcatcaaagtgtgcgagttccagttctgcaacgaccccttcctgggcgtctactaccacaaaaacaacaagagctggatggaaagcgagttccgggtgtacagcagcgccaacaactgcaccttcgagtacgtgtcccagcctttcctgatggacctggaaggcaagcagggcaacttcaagaacctgcgcgagttcgtgttcaagaacatcgacggctacttcaagatctacagcaagcacacccctatcaacctcgtgcgggatctgcctcagggcttctctgctctggaacccctggtggatctgcccatcggcatcaacatcacccggtttcagacactgctggccctgcacagaagctacctgacacctggcgatagcagctctggatggacagctggcgccgctgcctactatgtgggatacctgcagcctcggaccttcctgctgaagtacaacgagaacggcaccatcaccgacgccgtggattgtgcccttgatcctctgagcgagacaaagtgcaccctgaagtccttcacactgcccgaaacaggcggcggatctctggaagtgctgtttcaaggccctggcagccaccaccatcaccatcatcatcacagcgcttggagccatcctcagttcgagaaaggcggaggatctggcggaggtggaagtggcggatctgcttggtcacacccacagtttgagaagtgatga

SEQ ID NO: 177 - protein, 381 aa, Artificial Sequence
  Description of Artificial Sequence: Synthetic polypeptide
MDSKGSSQKGSRLLLLLVVSNLLLPQGVLAQCVNLTTRTQLPPAYTNSFTRGVYYPDKVFRSSVLHSTQDLFLPFFSNVTWFHAIHVSGTNGTKRFDNPVLPFNDGVYFASTEKSNIIRGWIFGTTLDSKTQSLLIVNNATNVVIKVCEFQFCNDPFLGVYYHKNNKSWMESEFRVYSSANNCTFEYVSQPFLMDLEGKQGNFKNLREFVFKNIDGYFKIYSKHTPINLVRDLPQGFSALEPLVDLPIGINITRFQTLLALHRSYLTPGDSSSGWTAGAAAYYVGYLQPRTFLLKYNENGTITDAVDCALDPLSETKCTLKSFTLPETGGGSLEVLFQGPGSHHHHHHHHSAWSHPQFEKGGGSGGGGSGGSAWSHPQFEK

SEQ ID NO: 178 - DNA, 648 bp, Artificial Sequence
  Description of Artificial Sequence: Synthetic polynucleotide
atgggctggagctgcatcattctgtttctggtggccacagccacaggagtgcacgccacaaacctgtgtcctttcggcgaggtgttcaatgccaccagattcgccagcgtgtacgcttggaaccgcaagagaatctccaactgcgtagctgactacagcgtcctgtataacagcgcctctttttctaccttcaagtgctacggcgttagccctacaaagctgaacgacctgtgcttcacaaacgtgtacgccgatagcttcgtgattagaggcgacgaggtgcggcagatcgcccccggccagaccggcaagatcgccgactacaactataagctgcccgacgacttcaccggctgtgtgatcgcctggaacagcaacaacctggacagcaaggtgggaggcaactataactacctttaccggctgttcagaaagagcaatctgaaacctttcgagagagatatcagcaccgaaatctaccaggccggctctaccccttgtaacggcgtggaaggcttcaactgctacttcccactgcagagctacggctttcagcctaccaatggcgtgggctaccaaccttacagagtggtggtcctgagctttgagctgctgcacgccccagccaccgtgtgtggcccttaatag

SEQ ID NO: 179 - protein, 214 aa, Artificial Sequence
  Description of Artificial Sequence: Synthetic polypeptide
MGWSCIILFLVATATGVHATNLCPFGEVFNATRFASVYAWNRKRISNCVADYSVLYNSASFSTFKCYGVSPTKLNDLCFTNVYADSFVIRGDEVRQIAPGQTGKIADYNYKLPDDFTGCVIAWNSNNLDSKVGGNYNYLYRLFRKSNLKPFERDISTEIYQAGSTPCNGVEGFNCYFPLQSYGFQPTNGVGYQPYRVVVLSFELLHAPATVCGP

SEQ ID NO: 180 - DNA, 666 bp, Artificial Sequence
  Description of Artificial Sequence: Synthetic polynucleotide
gtcgacgccaccatgggctggagctgcatcattctgtttctggtggccacagccacaggagtgcacgccacaaacctgtgtcctttcggcgaggtgttcaatgccaccagattcgccagcgtgtacgcttggaaccgcaagagaatctccaactgcgtagctgactacagcgtcctgtataacagcgcctctttttctaccttcaagtgctacggcgttagccctacaaagctgaacgacctgtgcttcacaaacgtgtacgccgatagcttcgtgattagaggcgacgaggtgcggcagatcgcccccggccagaccggcaagatcgccgactacaactataagctgcccgacgacttcaccggctgtgtgatcgcctggaacagcaacaacctggacagcaaggtgggaggcaactataactacctttaccggctgttcagaaagagcaatctgaaacctttcgagagagatatcagcaccgaaatctaccaggccggctctaccccttgtaacggcgtggaaggcttcaactgctacttcccactgcagagctacggctttcagcctaccaatggcgtgggctaccaaccttacagagtggtggtcctgagctttgagctgctgcacgccccagccaccgtgtgtggcccttaatagggatcc

SEQ ID NO: 181 - DNA, 762 bp, Artificial Sequence
  Description of Artificial Sequence: Synthetic polynucleotide
gtcgacgccaccatgggctggagctgcatcatcctgttcctggtggccacagctaccggcgtgcacgccaccaacctgtgtcctttcgacgaggttttcaacgccaccagattcgcctctgtgtacgcctggaataggaagcggatcagcaactgcgtggccgactacagcgtgctctacaatttcgccccattcttcgccttcaagtgctacggcgtgtccccaacaaagctgaacgacctgtgcttcaccaacgtgtatgctgatagctttgtgattagaggcaacgaggtgcggcagatcgctcctggccagaccggcaacatcgccgattacaactacaagctgcctgatgacttcaccggttgtgtgatcgcctggaactctaacaagctggactctaaggtgggcggaaattataattacctgtacagactgttcagaaaaagcaacctgaagcccttcgagcgggacatcagcacagaaatctaccaagccggcaacaagccttgcaacggcgtcgccggctttaactgttacttccccctgagaagctacggatttagacctacatacggcgtgggacaccagccatacagagtggtcgtgctgagcttcgaactgctgcacgcccctgctaccgtgtgcggacctaagaaggggagcggcctgcctgagacaggcggaggctccctggaagtgctgtttcagggccctggctctgcctggtcccatccccagttcgaaaaatgatgaagatct

SEQ ID NO: 182 - DNA, 825 bp, Artificial Sequence
  Description of Artificial Sequence: Synthetic polynucleotide
gtcgacgccaccatgggctggagctgcatcatcctgttcctggtggccacagctaccggcgtgcacgccaccaacctgtgtcctttcgacgaggttttcaacgccaccagattcgcctctgtgtacgcctggaataggaagcggatcagcaactgcgtggccgactacagcgtgctctacaatttcgccccattcttcgccttcaagtgctacggcgtgtccccaacaaagctgaacgacctgtgcttcaccaacgtgtatgctgatagctttgtgattagaggcaacgaggtgcggcagatcgctcctggccagaccggcaacatcgccgattacaactacaagctgcctgatgacttcaccggttgtgtgatcgcctggaactctaacaagctggactctaaggtgggcggaaattataattacctgtacagactgttcagaaaaagcaacctgaagcccttcgagcgggacatcagcacagaaatctaccaagccggcaacaagccttgcaacggcgtcgccggctttaactgttacttccccctgagaagctacggatttagacctacatacggcgtgggacaccagccatacagagtggtcgtgctgagcttcgaactgctgcacgcccctgctaccgtgtgcggacctaagaaggggagcggcctgcctgagacaggcggaggctccctggaagtgctgtttcagggccctggcagcgcttggtcccatcctcagttcgaaaagggcggcggaagcggaggcggcggctctggaggcagcgcctggagccacccccaatttgagaaatgatgaagatct

SEQ ID NO: 183 - DNA, 711 bp, Artificial Sequence
  Description of Artificial Sequence: Synthetic polynucleotide
gtcgacgccaccatgggctggagctgcatcatcctgttcctggtggccacagctaccggcgtgcacgccaccaacctgtgtcctttcgacgaggttttcaacgccaccagattcgcctctgtgtacgcctggaataggaagcggatcagcaactgcgtggccgactacagcgtgctctacaatttcgccccattcttcgccttcaagtgctacggcgtgtccccaacaaagctgaacgacctgtgcttcaccaacgtgtatgctgatagctttgtgattagaggcaacgaggtgcggcagatcgctcctggccagaccggcaacatcgccgattacaactacaagctgcctgatgacttcaccggttgtgtgatcgcctggaactctaacaagctggactctaaggtgggcggaaattataattacctgtacagactgttcagaaaaagcaacctgaagcccttcgagcgggacatcagcacagaaatctaccaagccggcaacaagccttgcaacggcgtcgccggctttaactgttacttccccctgagaagctacggatttagacctacatacggcgtgggacaccagccatacagagtggtcgtgctgagcttcgaactgctgcacgcccctgctaccgtgtgcggacctaagaaggggagcggcctgcctgagacaggcggagagcctgaggcctgatgaagatct

SEQ ID NO: 184 - DNA, 717 bp, Artificial Sequence
  Description of Artificial Sequence: Synthetic polynucleotide
gtcgacgccaccatgggctggagctgcatcatcctgttcctggtggccacagctaccggcgtgcacgccaccaacctgtgtcctttcgacgaggttttcaacgccaccagattcgcctctgtgtacgcctggaataggaagcggatcagcaactgcgtggccgactacagcgtgctctacaatttcgccccattcttcgccttcaagtgctacggcgtgtccccaacaaagctgaacgacctgtgcttcaccaacgtgtatgctgatagctttgtgattagaggcaacgaggtgcggcagatcgctcctggccagaccggcaacatcgccgattacaactacaagctgcctgatgacttcaccggttgtgtgatcgcctggaactctaacaagctggactctaaggtgggcggaaattataattacctgtacagactgttcagaaaaagcaacctgaagcccttcgagcgggacatcagcacagaaatctaccaagccggcaacaagccttgcaacggcgtcgccggctttaactgttacttccccctgagaagctacggatttagacctacatacggcgtgggacaccagccatacagagtggtcgtgctgagcttcgaactgctgcacgcccctgctaccgtgtgcggacctaagaaggggagcggcctgcctgagacaggcggacaccaccaccaccaccactgatgaagatct

SEQ ID NO: 185 - DNA, 1149 bp, Artificial Sequence
  Description of Artificial Sequence: Synthetic polynucleotide
atggattctaagggcagcagccagaagggctccagactgctgctgcttctggtggtgtccaacctcctgctgcctcaaggcgttctggcctctgcttggagccatcctcagttcgagaaaggcggaggatctggcggaggtggaagtggtggatctgcttggtcacacccacagtttgagaagcaccaccatcatcaccatcaccacctggaagtgctgtttcaaggccctggcagcggcagccagtgtgtgaatctgaccacaagaacccagctgcctccagcctacaccaacagctttaccagaggcgtgtactaccccgacaaggtgttcagatccagcgtgctgcactctacccaggacctgttcctgcctttcttcagcaacgtgacctggttccacgccatccacgtgtccggcaccaatggcaccaagagattcgacaaccccgtgctgcctttcaacgacggggtgtactttgccagcaccgagaagtccaacatcatcagaggctggatcttcggcaccacactggacagcaagacccagagcctgctgatcgtgaacaacgccaccaacgtggtcatcaaagtgtgcgagttccagttctgcaacgaccccttcctgggcgtctactatcacaagaacaacaagagctggatggaaagcgagttccgggtgtacagcagcgccaacaactgcaccttcgagtacgtgtcccagcctttcctgatggacctggaaggcaagcagggcaacttcaagaacctgcgcgagttcgtgttcaagaacatcgacggctacttcaagatctacagcaagcacacccctatcaacctcgtgcgggatctgcctcagggcttctctgctctggaacccctggtggacctgcctatcggcatcaacatcacccggtttcagaccctgctggccctgcacagaagctaccttacacctggcgatagcagcagcggatggacagctggtgccgccgcttactatgtgggctacctgcagcctagaaccttcctgctgaagtacaacgagaacggcaccatcacagacgccgtggactgtgcccttgatcctctgagcgagacaaagtgcaccctgaagtccttcacactgcctagcaccggcggctgataa

SEQ ID NO: 186 - DNA, 1149 bp, Artificial Sequence; identical to SEQ ID NO: 176
  Description of Artificial Sequence: Synthetic polynucleotide

SEQ ID NO: 187 - DNA, 3924 bp, Artificial Sequence
  Description of Artificial Sequence: Synthetic polynucleotide
atgcctatgggatctctgcagcctctggccacactgtacctgctgggaatgctggtggctagcgtgctggcccagtgtgtgaacctgaccaccagaacacagctgcctccagcctacaccaacagctttaccagaggcgtgtactaccccgacaaggtgttcagatccagcgtgctgcactctacccaggacctgttcctgcctttcttcagcaacgtgacctggttccacgccatccacgtgtccggcaccaatggcaccaagagattcgacaaccccgtgctgcccttcaacgacggggtgtactttgccagcaccgagaagtccaacatcatcagaggctggatcttcggcaccacactggacagcaagacccagagcctgctgatcgtgaacaacgccaccaacgtggtcatcaaagtgtgcgagttccagttctgcaacgaccccttcctgggcgtctactaccacaagaacaacaagagctggatggaaagcgagttccgggtgtacagcagcgccaacaactgcaccttcgagtacgtgtcccagcctttcctgatggacctggaaggcaagcagggcaacttcaagaacctgcgcgagttcgtgttcaagaacatcgacggctacttcaagatctacagcaagcacacccctatcaacctcgtgcgggatctgcctcagggcttctctgctctggaacccctggtggatctgcccatcggcatcaacatcacccggtttcagacactgctggccctgcacagaagctacctgacacctggcgatagcagcagcggatggacagctggtgccgccgcttactatgtgggctacctgcagcctagaaccttcctgctgaagtacaacgagaacggcaccatcaccgacgccgtggattgtgcccttgatcctctgagcgagacaaagtgcaccctgaagtccttcaccgtggaaaagggcatctaccagaccagcaacttccgggtgcagcccaccgaatccatcgtgcggttccccaatatcaccaatctgtgccccttcggcgaggtgttcaatgccaccagattcgcctctgtgtacgcctggaaccggaagcggatcagcaattgcgtggccgactactccgtgctgtacaactccgccagcttcagcaccttcaagtgctacggcgtgtcccctaccaagctgaacgacctgtgcttcacaaacgtgtacgccgacagcttcgtgatccggggagatgaagtgcggcagattgcccctggacagacaggcaagatcgccgactacaactacaagctgcccgacgacttcaccggctgtgtgattgcctggaacagcaacaacctggactccaaagtcggcggcaactacaattacctgtaccggctgttccggaagtccaatctgaagcccttcgagcgggacatctccaccgagatctatcaggccggcagcaccccttgtaacggcgtggaaggcttcaactgctacttcccactgcagtcctacggctttcagcccacaaatggcgtgggctatcagccctacagagtggtggtgctgagcttcgaactgctgcatgcccctgccacagtgtgcggccctaagaaaagcaccaatctcgtgaagaacaaatgcgtgaacttcaacttcaacggcctgaccggcaccggcgtgctgacagagagcaacaagaagttcctgccattccagcagtttggccgggatatcgccgataccacagacgccgttagagatccccagacactggaaatcctggacatcaccccttgcagcttcggcggagtgtctgtgatcacccctggcaccaacaccagcaatcaggtggcagtgctgtaccaggacgtgaactgtaccgaagtgcccgtggccattcacgccgatcagctgacacctacatggcgggtgtactccaccggcagcaatgtgtttcagaccagagccggctgtctgatcggagccgagcacgtgaacaatagctacgagtgcgacatccccatcggcgctggcatctgtgccagctaccagacacagacaaacagccctggcagcgcctcttctgtggccagccagagcatcattgcctacacaatgtctctgggcgccgagaacagcgtggcctactccaacaactctatcgctatccccaccaacttcaccatcagcgtgaccacagagatcctgcctgtgtccatgaccaagaccagcgtggactgcaccatgtacatctgcggcgattccaccgagtgctccaacctgctgctgcagtacggcagcttctgcacccagctgaatagagccctgacagggatcgccgtggaacaggacaagaacacccaagaggtgttcgcccaagtgaagcagatctacaagacccctcctatcaaggacttcggcggcttcaatttcagccagattctgcccgatcctagcaagcccagcaagcggagcttcatcgaggacctgctgttcaacaaagtgacactggccgacgccggcttcatcaagcagtatggcgattgtctgggcgacattgccgccagggatctgatttgcgcccagaagtttaacggactgacagtgctgcctcctctgctgaccgatgagatgatcgcccagtacacatctgccctgctggccggcacaatcacaagcggctggacatttggagctggcgccgctctgcagatcccctttgctatgcagatggcctaccggttcaacggcatcggagtgacccagaatgtgctgtacgagaaccagaagctgatcgccaaccagttcaacagcgccatcggcaagatccaggacagcctgagcagcacagcaagcgccctgggaaagctgcaggacgtggtcaaccagaatgcccaggcactgaacaccctggtcaagcagctgtcctccaacttcggcgccatcagctctgtgctgaacgatatcctgagcagactggaccctcctgaggccgaggtgcagatcgacagactgatcacaggcagactgcagagcctccagacatacgtgacccagcagctgatcagagccgccgagattagagcctctgccaatctggccgccaccaagatgtctgagtgtgtgctgggccagagcaagagagtggacttttgcggcaagggctaccacctgatgagcttccctcagtctgcccctcacggcgtggtgtttctgcacgtgacatatgtgcccgctcaagagaagaatttcaccaccgctccagccatctgccacgacggcaaagcccactttcctagagaaggcgtgttcgtgtccaacggcacccattggttcgtgacacagcggaacttctacgagccccagatcatcaccaccgacaacaccttcgtgtctggcaactgcgacgtcgtgatcggcattgtgaacaataccgtgtacgaccctctgcagcccgagctggacagcttcaaagaggaactggacaagtactttaagaaccacacaagccccgacgtggacctgggcgatatcagcggaatcaatgccagcgtcgtgaacatccagaaagagatcgaccggctgaacgaggtggccaagaatctgaacgagagcctgatcgacctgcaagaactggggaagtacgagcaaggcagcggctacattcccgaggctcctagagatggccaggcctacgttagaaaggacggcgagtgggtcctgctgagcacctttctgggaagatctctgcctgagaccggaggactggaggtgctgttccagggcccaggccatcaccaccatcaccaccatcatagcgcctggtcccacccccagttcgagaagggcggcggtagtggagggggcggatctggcggctcagcttggagccacccccagttcgaaaagtgataatga

SEQ ID NO: 188 - DNA, 747 bp, Artificial Sequence
  Description of Artificial Sequence: Synthetic polynucleotide
gtcgacgccaccatgggctggtcctgcatcatcctgttcctggtggctaccgccacaggcgtgcacgccaccaacctgtgccccttcgacgaggtgttcaacgccacaagattcgcctctgtctacgcctggaatagaaaaagaatcagcaactgcgtggctgattactctgtgctgtataatctggcccctttcttcaccttcaagtgctacggcgtgtcccctaccaagctgaacgacctgtgttttacaaacgtgtacgccgatagcttcgtgatcagaggcgacgaagtgcggcagatcgcccctggccagaccggcaacatcgccgactacaactataagctgcctgatgacttcaccggttgtgtgattgcctggaacagcaacaaactggactcaaaggtgtctggcaattacaactacctgtaccggctgttcagaaagagcaatctcaagccattcgagcgggacatcagcaccgaaatctaccaggccggcaacaagccctgcaacggcgttgctggcttcaactgttacttccctctgagaagctacagctttaggcccacctacggcgtgggccaccagccttacagagtggtcgtgctgagcttcgagctgctgcacgccccagccaccgtgtgcggccccaagaaggggagcggcctgcctgagacaggcggaggcagcctggaagtgctgtttcagggccctcaccaccaccaccaccactgatgaggatcc

SEQ ID NO: 189 - DNA, 711 bp, Artificial Sequence
  Description of Artificial Sequence: Synthetic polynucleotide
gtcgacgccaccatgggctggtcctgcatcatcctgttcctggtggctaccgccacaggcgtgcacgccaccaacctgtgccccttcgacgaggtgttcaacgccacaagattcgcctctgtctacgcctggaatagaaaaagaatcagcaactgcgtggctgattactctgtgctgtataatctggcccctttcttcaccttcaagtgctacggcgtgtcccctaccaagctgaacgacctgtgttttacaaacgtgtacgccgatagcttcgtgatcagaggcgacgaagtgcggcagatcgcccctggccagaccggcaacatcgccgactacaactataagctgcctgatgacttcaccggttgtgtgattgcctggaacagcaacaaactggactcaaaggtgtctggcaattacaactacctgtaccggctgttcagaaagagcaatctcaagccattcgagcgggacatcagcaccgaaatctaccaggccggcaacaagccctgcaacggcgttgctggcttcaactgttacttccctctgagaagctacagctttaggcccacctacggcgtgggccaccagccttacagagtggtcgtgctgagcttcgagctgctgcacgccccagccaccgtgtgcggccccaagaaggggagcggcctgcctgagacaggcggagagcctgaggcctgatgaggatcc

SEQ ID NO: 190 - DNA, 747 bp, Artificial Sequence
  Description of Artificial Sequence: Synthetic polynucleotide
gtcgacgccaccatgggctggtcctgcatcatcctgttcctggtggctaccgccacaggcgtgcacgccaccaacctgtgccccttcgacgaggtgttcaacgccacaagattcgcctctgtctacgcctggaatagaaaaagaatcagcaactgcgtggctgattactctgtgctgtataatctggcccctttcttcaccttcaagtgctacggcgtgtcccctaccaagctgaacgacctgtgttttacaaacgtgtacgccgatagcttcgtgatcagaggcgacgaagtgcggcagatcgcccctggccagaccggcaacatcgccgactacaactataagctgcctgatgacttcaccggttgtgtgattgcctggaacagcaacaaactggactcaaaggtgtctggcaattacaactaccggtaccggctgttcagaaagagcaatctcaagccattcgagcgggacatcagcaccgaaatctaccaggccggcaacaagccctgcaacggcgttgctggcttcaactgttacttccctctgagaagctacagctttaggcccacctacggcgtgggccaccagccttacagagtggtcgtgctgagcttcgagctgctgcacgccccagccaccgtgtgcggccccaagaaggggagcggcctgcctgagacaggcggaggcagcctggaagtgctgtttcagggccctcaccaccaccaccaccactgatgaggatcc

SEQ ID NO: 191 - DNA, 747 bp, Artificial Sequence
  Description of Artificial Sequence: Synthetic polynucleotide
gtcgacgccaccatgggctggtcctgcatcatcctgttcctggtggctaccgccacaggcgtgcacgccaccaacctgtgccccttcgacgaggtgttcaacgccacaaaattcgcctctgtctacgcctggaatagaaaaagaatcagcaactgcgtggctgattactctgtgctgtataatctggcccctttcttcaccttcaagtgctacggcgtgtcccctaccaagctgaacgacctgtgttttacaaacgtgtacgccgatagcttcgtgatcagaggcgacgaagtgcggcagatcgcccctggccagaccggcaacatcgccgactacaactataagctgcctgatgacttcaccggttgtgtgattgcctggaacagcaacaaactggactcaaaggtgtctggcaattacaactacctgtaccggctgttcagaaagagcaatctcaagccattcgagcgggacatcagcaccgaaatctaccaggccggcaacaagccctgcaacggcgttgctggcttcaactgttacttccctctgagaagctacagctttaggcccacctacggcgtgggccaccagccttacagagtggtcgtgctgagcttcgagctgctgcacgccccagccaccgtgtgcggccccaagaaggggagcggcctgcctgagacaggcggaggcagcctggaagtgctgtttcagggccctcaccaccaccaccaccactgatgaggatcc

SEQ ID NO: 192 - protein, 246 aa, Artificial Sequence
  Description of Artificial Sequence: Synthetic polypeptide
MGWSCIILFLVATATGVHATNLCPFDEVFNATRFASVYAWNRKRISNCVADYSVLYNFAPFFAFKCYGVSPTKLNDLCFTNVYADSFVIRGNEVRQIAPGQTGNIADYNYKLPDDFTGCVIAWNSNKLDSKVGGNYNYLYRLFRKSNLKPFERDISTEIYQAGNKPCNGVAGFNCYFPLRSYGFRPTYGVGHQPYRVVVLSFELLHAPATVCGPKKGSGLPETGGGSLEVLFQGPGSAWSHPQFEK

SEQ ID NO: 193 - protein, 267 aa, Artificial Sequence
  Description of Artificial Sequence: Synthetic polypeptide
MGWSCIILFLVATATGVHATNLCPFDEVFNATRFASVYAWNRKRISNCVADYSVLYNFAPFFAFKCYGVSPTKLNDLCFTNVYADSFVIRGNEVRQIAPGQTGNIADYNYKLPDDFTGCVIAWNSNKLDSKVGGNYNYLYRLFRKSNLKPFERDISTEIYQAGNKPCNGVAGFNCYFPLRSYGFRPTYGVGHQPYRVVVLSFELLHAPATVCGPKKGSGLPETGGGSLEVLFQGPGSAWSHPQFEKGGGSGGGGSGGSAWSHPQFEK

SEQ ID NO: 194 - protein, 229 aa, Artificial Sequence
  Description of Artificial Sequence: Synthetic polypeptide
MGWSCIILFLVATATGVHATNLCPFDEVFNATRFASVYAWNRKRISNCVADYSVLYNFAPFFAFKCYGVSPTKLNDLCFTNVYADSFVIRGNEVRQIAPGQTGNIADYNYKLPDDFTGCVIAWNSNKLDSKVGGNYNYLYRLFRKSNLKPFERDISTEIYQAGNKPCNGVAGFNCYFPLRSYGFRPTYGVGHQPYRVVVLSFELLHAPATVCGPKKGSGLPETGGEPEA

SEQ ID NO: 195 - protein, 231 aa, Artificial Sequence
  Description of Artificial Sequence: Synthetic polypeptide
MGWSCIILFLVATATGVHATNLCPFDEVFNATRFASVYAWNRKRISNCVADYSVLYNFAPFFAFKCYGVSPTKLNDLCFTNVYADSFVIRGNEVRQIAPGQTGNIADYNYKLPDDFTGCVIAWNSNKLDSKVGGNYNYLYRLFRKSNLKPFERDISTEIYQAGNKPCNGVAGFNCYFPLRSYGFRPTYGVGHQPYRVVVLSFELLHAPATVCGPKKGSGLPETGGHHHHHH

SEQ ID NO: 196 - protein, 381 aa, Artificial Sequence; identical to SEQ ID NO: 89
  Description of Artificial Sequence: Synthetic polypeptide

SEQ ID NO: 197 - protein, 381 aa, Artificial Sequence; identical to SEQ ID NO: 177
  Description of Artificial Sequence: Synthetic polypeptide

SEQ ID NO: 198 - protein, 1305 aa, Artificial Sequence; identical to SEQ ID NO: 88
  Description of Artificial Sequence: Synthetic polypeptide

SEQ ID NO: 199 - protein, 1294 aa, Artificial Sequence; identical to SEQ ID NO: 95
  Description of Artificial Sequence: Synthetic polypeptide

SEQ ID NO: 200 - protein, 1291 aa, Artificial Sequence; identical to SEQ ID NO: 96
  Description of Artificial Sequence: Synthetic polypeptide

SEQ ID NO: 201 - protein, 241 aa, Artificial Sequence
  Description of Artificial Sequence: Synthetic polypeptide
MGWSCIILFLVATATGVHATNLCPFDEVFNATRFASVYAWNRKRISNCVADYSVLYNLAPFFTFKCYGVSPTKLNDLCFTNVYADSFVIRGDEVRQIAPGQTGNIADYNYKLPDDFTGCVIAWNSNKLDSKVSGNYNYLYRLFRKSNLKPFERDISTEIYQAGNKPCNGVAGFNCYFPLRSYSFRPTYGVGHQPYRVVVLSFELLHAPATVCGPKKGSGLPETGGGSLEVLFQGPHHHHHH

SEQ ID NO: 202 - protein, 229 aa, Artificial Sequence
  Description of Artificial Sequence: Synthetic polypeptide
MGWSCIILFLVATATGVHATNLCPFDEVFNATRFASVYAWNRKRISNCVADYSVLYNLAPFFTFKCYGVSPTKLNDLCFTNVYADSFVIRGDEVRQIAPGQTGNIADYNYKLPDDFTGCVIAWNSNKLDSKVSGNYNYLYRLFRKSNLKPFERDISTEIYQAGNKPCNGVAGFNCYFPLRSYSFRPTYGVGHQPYRVVVLSFELLHAPATVCGPKKGSGLPETGGEPEA

SEQ ID NO: 203 - protein, 241 aa, Artificial Sequence
  Description of Artificial Sequence: Synthetic polypeptide
MGWSCIILFLVATATGVHATNLCPFDEVFNATRFASVYAWNRKRISNCVADYSVLYNLAPFFTFKCYGVSPTKLNDLCFTNVYADSFVIRGDEVRQIAPGQTGNIADYNYKLPDDFTGCVIAWNSNKLDSKVSGNYNYRYRLFRKSNLKPFERDISTEIYQAGNKPCNGVAGFNCYFPLRSYSFRPTYGVGHQPYRVVVLSFELLHAPATVCGPKKGSGLPETGGGSLEVLFQGPHHHHHH

SEQ ID NO: 204 - protein, 241 aa, Artificial Sequence
  Description of Artificial Sequence: Synthetic polypeptide
MGWSCIILFLVATATGVHATNLCPFDEVFNATKFASVYAWNRKRISNCVADYSVLYNLAPFFTFKCYGVSPTKLNDLCFTNVYADSFVIRGDEVRQIAPGQTGNIADYNYKLPDDFTGCVIAWNSNKLDSKVSGNYNYLYRLFRKSNLKPFERDISTEIYQAGNKPCNGVAGFNCYFPLRSYSFRPTYGVGHQPYRVVVLSFELLHAPATVCGPKKGSGLPETGGGSLEVLFQGPHHHHHH

SEQ ID NO: 205 - DNA, 1239 bp, Artificial Sequence
  Description of Artificial Sequence: Synthetic polynucleotide
atgggctggagctgcatcatcctgtttctggtggccacagccacaggcgtgcacgccagcgcctggtcccacccccagttcgaaaagctggaagtgctctttcagggaccaggctccaccaatctctgtcccttcggcgaggtgttcaacgccacaagattcgccagcgtgtacgcctggaacagaaagcggatcagtaactgtgtggctgattacagcgtgctgtacaactctgcttctttcagcaccttcaagtgctacggcgtgtcccctaccaagctgaacgacctgtgcttcaccaacgtgtacgccgatagcttcgtgatcagaggcgacgaggtgcggcagatcgcacccggccagacaggcaagatcgccgattataactacaagctgcctgacgacttcaccggctgtgtcatcgcttggaattctaacaacctggactctaaggtgggaggaaattacaactacctgtaccggctgtttagaaaaagcaatctgaagcctttcgagcgcgacatcagcaccgaaatctaccaggccggcagcaccccttgcaacggcgtggaaggcttcaactgctatttccccctgcagagctacggctttcaacctacaaacggcgtcggctaccagccttacagagtggtcgtgctgagcttcgagctgctgcacgccccagccaccgtgtgcggccctggcggatccgagaaagccgctaaagccgaggaagccgccagagatatcattaagctgctgaatgagcaggtgaacaaggaaatgaacagctctaatctgtacatgagcatgagcagctggtgctacacccacagcctggacggcgccggactgttcttgttcgaccacgctgctgaagagtacgagcacgccaaaaagctgatcatcttcctgaacgagaataacgtgcctgtgcagctgacaagcatctctgcccccgagcataagttcgagggcctgacccaaatcttccaaaaggcctacgagcatgaacagcacatcagcgagagcattaacaacatcgtggaccacgctatcaagagcaaggaccacgccaccttcaacttcctgcaatggtacgtggccgagcagcacgaggaagaagttctgttcaaagacatcctggataagatcgagctgatcggcaacgagaaccacggactgtatctggccgatcagtacgtgaagggcatcgccaagtccagaaagtcttaatga

SEQ ID NO: 206 - DNA, 1236 bp, Artificial Sequence
  Description of Artificial Sequence: Synthetic polynucleotide
atgggatggtcctgcatcattctgtttctggttgccaccgccacaggcgtgcacgcctctgcttggagccacccccagttcgagaagctggaagtcctgttccagggccccggcagcaccaacctgtgtcctttcggcgaggtgttcaacgccacaaagttccccagcgtgtacgcctgggagagaaaaagaatcagcaactgcgtagccgattactccgtgctgtacaacagcaccttcttcagcaccttcaagtgctacggcgtgtccgccaccaaattgaacgacctgtgcttctctaacgtgtacgccgacagcttcgtggtcaagggcgacgatgtgcggcagatcgcccccggccagaccggcgtgatcgccgactacaattacaagctgcctgatgacttcatgggctgcgtgctggcctggaacaccagaaacatcgacgctaccagcacaggcaactacaactataagtaccggtacctgcggcacggcaagctcagaccttttgaacgcgacatcagcaatgtgcccttcagtcccgacggaaagccttgtaccccacctgccctgaattgctactggcctctgaacgactacggcttctacaccaccaccggaatcggctaccagccttacagagtggttgtgctgagctttgagctgctgaatgcccctgctaccgtgtgcggccctggaggatccgaaaaagccgctaaagccgaagaggccgccagagatatcatcaagctgctgaacgagcaagtgaacaaggaaatgaacagcagcaatctgtacatgtccatgagcagctggtgttatacacacagcctggacggcgccggcctgttcctgttcgaccacgctgctgaagagtacgagcacgccaaaaagctcatcatcttcctgaatgaaaacaacgtgccagtgcagctgacatctatctctgcccctgagcataagttcgaaggcctgacacaaatcttccagaaggcctacgagcacgagcaacacatcagcgagagcatcaacaacattgtggaccacgcaatcaagagcaaggaccacgccacattcaacttcctgcagtggtacgtggccgagcagcatgaagaggaagtgctgtttaaggacatcctggataagatcgagctgatcggaaacgagaaccacgggctgtatctggccgatcagtacgtgaagggcatcgctaagagcagaaagtcctaatga

SEQ ID NO: 207 - DNA, 1374 bp, Artificial Sequence
  Description of Artificial Sequence: Synthetic polynucleotide
atgggctggagctgcatcatcctgtttctggtggccacagccacaggcgtgcacgccagcgcctggtcccaccctcaatttgagaaactggaagtgctgtttcagggccctggctctgaggccaaacctagcggcagcgtggtggaacaggccgaaggcgtggaatgcgacttcagcccactgctcagtggaacacccccccaggtgtacaatttcaagcggctggtgttcaccaactgcaactacaacctgacaaagctgctgagcctgttcagcgtcaatgatttcacctgttcacagatcagccccgccgctatcgcctctaactgctacagctctctgatcctggactacttctcttaccctctgagcatgaaaagcgacctgtctgtttctagcgccggacctatcagccaatttaactacaagcagagcttcagcaaccccacatgcctgatcctggctaccgtgccccacaacctgaccaccatcaccaagcccctgaagtactcttatatcaacaagtgcagcagactgctgtctgatgatagaaccgaggtgcctcagctggtgaacgccaatcagtactccccttgtgtgtcgatcgtgcctagcaccgtgtgggaagatggcgactactaccggaagcagctgtcccctctggaaggaggaggctggctggttgctagcggaagcaccgtggctatgaccgagcagcttcagatgggcttcggcattaccgtccagtacggcacagacaccaatagcgtgtgtcctaaactggagttcgccaacgacaccaagatcgccagccagctgggcaattgcgtggaatatggcggatccgagaaggccgcaaaagccgaggaagccgccagagatatcattaagctgctgaacgagcaagtgaacaaggagatgaacagcagcaacctgtacatgagcatgtccagctggtgctacacccacagcctggacggcgccggcctgttcctgttcgaccacgccgctgaagaatacgagcacgccaagaaactgatcatcttcctgaatgaaaacaacgtgccagtgcagctgacatctatctctgcccctgagcataagttcgagggcctgacacaaatcttccagaaggcctacgagcacgagcagcacatctccgagagcattaacaacatcgtggaccacgccatcaagtcaaaggaccatgctaccttcaacttcctgcagtggtacgtggccgagcagcacgaggaagaggtcctgtttaaggacatcctggataagatcgagctgatcggcaacgagaaccacggcctgtacctcgccgaccagtatgtgaagggcatcgccaagtccagaaagagctaatga

SEQ ID NO: 208 - DNA, 1272 bp, Artificial Sequence
  Description of Artificial Sequence: Synthetic polynucleotide
atggacagcaagggttcttctcagaagggcagcagactgctgctgctgctggtggtcagcaacctgctgctccctcagggcgtgctggccagcgcctggtcccacccccagttcgaaaagctggaagtgctctttcagggaccaggctccaccaatctctgtcccttcggcgaggtgttcaacgccacaagattcgccagcgtgtacgcctggaacagaaagcggatcagtaactgtgtggctgattacagcgtgctgtacaactctgcttctttcagcaccttcaagtgctacggcgtgtcccctaccaagctgaacgacctgtgcttcaccaacgtgtacgccgatagcttcgtgatcagaggcgacgaggtgcggcagatcgcacccggccagacaggcaagatcgccgattataactacaagctgcctgacgacttcaccggctgtgtcatcgcttggaattctaacaacctggactctaaggtgggaggaaattacaactacctgtaccggctgtttagaaaaagcaatctgaagcctttcgagcgcgacatcagcaccgaaatctaccaggccggcagcaccccttgcaacggcgtggaaggcttcaactgctatttccccctgcagagctacggctttcaacctacaaacggcgtcggctaccagccttacagagtggtcgtgctgagcttcgagctgctgcacgccccagccaccgtgtgcggccctggcggatccgagaaagccgctaaagccgaggaagccgccagagatatcattaagctgctgaatgagcaggtgaacaaggaaatgaacagctctaatctgtacatgagcatgagcagctggtgctacacccacagcctggacggcgccggactgttcttgttcgaccacgctgctgaagagtacgagcacgccaaaaagctgatcatcttcctgaacgagaataacgtgcctgtgcagctgacaagcatctctgcccccgagcataagttcgagggcctgacccaaatcttccaaaaggcctacgagcatgaacagcacatcagcgagagcattaacaacatcgtggaccacgctatcaagagcaaggaccacgccaccttcaacttcctgcaatggtacgtggccgagcagcacgaggaagaagttctgttcaaagacatcctggataagatcgagctgatcggcaacgagaaccacggactgtatctggccgatcagtacgtgaagggcatcgccaagtccagaaagtcttaatga

SEQ ID NO: 209 - DNA, 1269 bp, Artificial Sequence
  Description of Artificial Sequence: Synthetic polynucleotide
atggacagcaagggctctagccagaaaggcagcagactgctgctgctgctggtagtcagcaacctgctgctgcctcagggcgttctggcctctgcttggagccacccccagttcgagaagctggaagtcctgttccagggccccggcagcaccaacctgtgtcctttcggcgaggtgttcaacgccacaaagttccccagcgtgtacgcctgggagagaaaaagaatcagcaactgcgtagccgattactccgtgctgtacaacagcaccttcttcagcaccttcaagtgctacggcgtgtccgccaccaaattgaacgacctgtgcttctctaacgtgtacgccgacagcttcgtggtcaagggcgacgatgtgcggcagatcgcccccggccagaccggcgtgatcgccgactacaattacaagctgcctgatgacttcatgggctgcgtgctggcctggaacaccagaaacatcgacgctaccagcacaggcaactacaactataagtaccggtacctgcggcacggcaagctcagaccttttgaacgcgacatcagcaatgtgcccttcagtcccgacggaaagccttgtaccccacctgccctgaattgctactggcctctgaacgactacggcttctacaccaccaccggaatcggctaccagccttacagagtggttgtgctgagctttgagctgctgaatgcccctgctaccgtgtgcggccctggaggatccgaaaaagccgctaaagccgaagaggccgccagagatatcatcaagctgctgaacgagcaagtgaacaaggaaatgaacagcagcaatctgtacatgtccatgagcagctggtgttatacacacagcctggacggcgccggcctgttcctgttcgaccacgctgctgaagagtacgagcacgccaaaaagctcatcatcttcctgaatgaaaacaacgtgccagtgcagctgacatctatctctgcccctgagcataagttcgaaggcctgacacaaatcttccagaaggcctacgagcacgagcaacacatcagcgagagcatcaacaacattgtggaccacgcaatcaagagcaaggaccacgccacattcaacttcctgcagtggtacgtggccgagcagcatgaagaggaagtgctgtttaaggacatcctggataagatcgagctgatcggaaacgagaaccacgggctgtatctggccgatcagtacgtgaagggcatcgctaagagcagaaagtcctaatga

SEQ ID NO: 210 - DNA, 1407 bp, Artificial Sequence
  Description of Artificial Sequence: Synthetic polynucleotide
atggacagcaagggctcttctcagaagggaagtagactgctgctgctcctcgttgtgtccaacctgctgctgcctcagggggtgctggctagcgcctggtcccaccctcaatttgagaaactggaagtgctgtttcagggccctggctctgaggccaaacctagcggcagcgtggtggaacaggccgaaggcgtggaatgcgacttcagcccactgctcagtggaacacccccccaggtgtacaatttcaagcggctggtgttcaccaactgcaactacaacctgacaaagctgctgagcctgttcagcgtcaatgatttcacctgttcacagatcagccccgccgctatcgcctctaactgctacagctctctgatcctggactacttctcttaccctctgagcatgaaaagcgacctgtctgtttctagcgccggacctatcagccaatttaactacaagcagagcttcagcaaccccacatgcctgatcctggctaccgtgccccacaacctgaccaccatcaccaagcccctgaagtactcttatatcaacaagtgcagcagactgctgtctgatgatagaaccgaggtgcctcagctggtgaacgccaatcagtactccccttgtgtgtcgatcgtgcctagcaccgtgtgggaagatggcgactactaccggaagcagctgtcccctctggaaggaggaggctggctggttgctagcggaagcaccgtggctatgaccgagcagcttcagatgggcttcggcattaccgtccagtacggcacagacaccaatagcgtgtgtcctaaactggagttcgccaacgacaccaagatcgccagccagctgggcaattgcgtggaatatggcggatccgagaaggccgcaaaagccgaggaagccgccagagatatcattaagctgctgaacgagcaagtgaacaaggagatgaacagcagcaacctgtacatgagcatgtccagctggtgctacacccacagcctggacggcgccggcctgttcctgttcgaccacgccgctgaagaatacgagcacgccaagaaactgatcatcttcctgaatgaaaacaacgtgccagtgcagctgacatctatctctgcccctgagcataagttcgagggcctgacacaaatcttccagaaggcctacgagcacgagcagcacatctccgagagcattaacaacatcgtggaccacgccatcaagtcaaaggaccatgctaccttcaacttcctgcagtggtacgtggccgagcagcacgaggaagaggtcctgtttaaggacatcctggataagatcgagctgatcggcaacgagaaccacggcctgtacctcgccgaccagtatgtgaagggcatcgccaagtccagaaagagctaatga

SEQ ID NO: 211 - DNA, 1332 bp, Artificial Sequence
  Description of Artificial Sequence: Synthetic polynucleotide
atgggctggagctgcatcatcctgttcctggtggccaccgccaccggcgttcatgctagcgcctggtcccaccctcaatttgagaaactggaagtgctgtttcagggccctggctctgtggaatgcgacttcagcccactgctcagtggaacacccccccaggtgtacaatttcaagcggctggtgttcaccaactgcaactacaacctgacaaagctgctgagcctgttcagcgtcaatgatttcacctgttcacagatcagccccgccgctatcgcctctaactgctacagctctctgatcctggactacttctcttaccctctgagcatgaaaagcgacctgtctgtttctagcgccggacctatcagccaatttaactacaagcagagcttcagcaaccccacatgcctgatcctggctaccgtgccccacaacctgaccaccatcaccaagcccctgaagtactcttatatcaacaagtgcagcagactgctgtctgatgatagaaccgaggtgcctcagctggtgaacgccaatcagtactccccttgtgtgtcgatcgtgcctagcaccgtgtgggaagatggcgactactaccggaagcagctgtcccctctggaaggaggaggctggctggttgctagcggaagcaccgtggctatgaccgagcagcttcagatgggcttcggcattaccgtccagtacggcacagacaccaatagcgtgtgtcctaaactggagggcggatccacacagtgcaacgtgaaccccgtgcagattccaaaggactggatcacaatgcacagatcctgcagaaacagcatgcggcagcaaatccagatggaggtgggcgctagcctgcagtacctggcaatgggcgcccacttcagcaaggacgtggtgaatagacctggcttcgcccagctgtttttcgacgccgcctctgaagagcgcgaacacgccatgaaactgatcgagtacctgctgatgagaggcgagctgaccaacgacgtgtccagcctgctgcaagtgcggcctcctaccagaagcagctggaaaggcggagtcgaggccctggaacacgccctcagcatggaatctgatgtgaccaagagcatcagaaatgtgatcaaggcttgtgaagatgattctgagttcaacgactaccacctggtggactacctgaccggagatttcctggaggaacagtataagggacagcgggacctggccggcaaggccagcacactgaagaagctgatggacagacacgaggccctgggcgagttcatctttgataagaaactgctcggcatcgacgtgtaatga

SEQ ID NO: 212 - DNA, 1335 bp, Artificial Sequence
  Description of Artificial Sequence: Synthetic polynucleotide
atgggctggtcttgtatcatcctgtttctggtcgccaccgccacaggcgtgcacgccgtggaatgcgacttcagcccactgctcagtggaacacccccccaggtgtacaatttcaagcggctggtgttcaccaactgcaactacaacctgacaaagctgctgagcctgttcagcgtcaatgatttcacctgttcacagatcagccccgccgctatcgcctctaactgctacagctctctgatcctggactacttctcttaccctctgagcatgaaaagcgacctgtctgtttctagcgccggacctatcagccaatttaactacaagcagagcttcagcaaccccacatgcctgatcctggctaccgtgccccacaacctgaccaccatcaccaagcccctgaagtactcttatatcaacaagtgcagcagactgctgtctgatgatagaaccgaggtgcctcagctggtgaacgccaatcagtactccccttgtgtgtcgatcgtgcctagcaccgtgtgggaagatggcgactactaccggaagcagctgtcccctctggaaggaggaggctggctggttgctagcggaagcaccgtggctatgaccgagcagcttcagatgggcttcggcattaccgtccagtacggcacagacaccaatagcgtgtgtcctaaactggagggcggatccgctgatacctgctacaacgacgtggccctggactgcggcatcaccagcaacagcctggccctccccagatgcaacgccgtgtacggcgagtatggcagccacggcaacgtggccacagagctgcaggcctacgccaaactgcacctggagcggagctacgactacctgctgagcgccgcctatttcaacaactaccagaccaatagagctggcttctccaagctgttcaagaaactgtctgatgaggcctggtccaagaccatcgacatcattaaacacgtgaccaagcgcggagataagatgaacttcgaccagcacagcaccatgaagacagaaagaaagaactacaccgccgagaaccacgagctggaagctctggccaaggccctggatacacagaaggaactggcagagagagccttctacatccaccgggaagctaccagaaatagccagcatctgcatgatcctgagatcgcccagtacctggaagaagagttcatcgaggaccacgccgaaaagatccggaccctggctggacacacctctgacctgaagaagttcatcacagccaacaatggccacgacctgagccttgccctgtacgtgtttgacgagtacctgcaaaaaacagtgtaatga

SEQ ID NO: 213 - DNA, 1287 bp, Artificial Sequence
  Description of Artificial Sequence: Synthetic polynucleotide
atgggctggagctgcatcatcctgttcctggtggccaccgccaccggcgttcatgcttctgcttggagccacccccagttcgagaagctggaagtcctgttccagggccccggcagcaccaacctgtgtcctttcggcgaggtgttcaacgccacaaagttccccagcgtgtacgcctgggagagaaaaagaatcagcaactgcgtagccgattactccgtgctgtacaacagcaccttcttcagcaccttcaagtgctacggcgtgtccgccaccaaattgaacgacctgtgcttctctaacgtgtacgccgacagcttcgtggtcaagggcgacgatgtgcggcagatcgcccccggccagaccggcgtgatcgccgactacaattacaagctgcctgatgacttcatgggctgcgtgctggcctggaacaccagaaacatcgacgctaccagcacaggcaactacaactataagtaccggtacctgcggcacggcaagctcagaccttttgaacgcgacatcagcaatgtgcccttcagtcccgacggaaagccttgtaccccacctgccctgaattgctactggcctctgaacgactacggcttctacaccaccaccggaatcggctaccagccttacagagtggttgtgctgagctttgagctgctgaatgcccctgctaccgtgtgcggccctggaggatccacacagtgcaacgtgaaccccgtgcagattccaaaggactggatcacaatgcacagatcctgcagaaacagcatgcggcagcaaatccagatggaggtgggcgctagcctgcagtacctggcaatgggcgcccacttcagcaaggacgtggtgaatagacctggcttcgcccagctgtttttcgacgccgcctctgaagagcgcgaacacgccatgaaactgatcgagtacctgctgatgagaggcgagctgaccaacgacgtgtccagcctgctgcaagtgcggcctcctaccagaagcagctggaaaggcggagtcgaggccctggaacacgccctcagcatggaatctgatgtgaccaagagcatcagaaatgtgatcaaggcttgtgaagatgattctgagttcaacgactaccacctggtggactacctgaccggagatttcctggaggaacagtataagggacagcgggacctggccggcaaggccagcacactgaagaagctgatggacagacacgaggccctgggcgagttcatctttgataagaaactgctcggcatcgacgtgtaatga

SEQ ID NO: 214 - DNA, 1350 bp, Artificial Sequence
  Description of Artificial Sequence: Synthetic polynucleotide
atgggctggtcttgtatcatcctgtttctggtcgccaccgccacaggcgtgcacgcctctgcttggagccacccccagttcgagaagctggaagtcctgttccagggccccggcagcaccaacctgtgtcctttcggcgaggtgttcaacgccacaaagttccccagcgtgtacgcctgggagagaaaaagaatcagcaactgcgtagccgattactccgtgctgtacaacagcaccttcttcagcaccttcaagtgctacggcgtgtccgccaccaaattgaacgacctgtgcttctctaacgtgtacgccgacagcttcgtggtcaagggcgacgatgtgcggcagatcgcccccggccagaccggcgtgatcgccgactacaattacaagctgcctgatgacttcatgggctgcgtgctggcctggaacaccagaaacatcgacgctaccagcacaggcaactacaactataagtaccggtacctgcggcacggcaagctcagaccttttgaacgcgacatcagcaatgtgcccttcagtcccgacggaaagccttgtaccccacctgccctgaattgctactggcctctgaacgactacggcttctacaccaccaccggaatcggctaccagccttacagagtggttgtgctgagctttgagctgctgaatgcccctgctaccgtgtgcggccctggaggatccgctgatacctgctacaacgacgtggccctggactgcggcatcaccagcaacagcctggccctccccagatgcaacgccgtgtacggcgagtatggcagccacggcaacgtggccacagagctgcaggcctacgccaaactgcacctggagcggagctacgactacctgctgagcgccgcctatttcaacaactaccagaccaatagagctggcttctccaagctgttcaagaaactgtctgatgaggcctggtccaagaccatcgacatcattaaacacgtgaccaagcgcggagataagatgaacttcgaccagcacagcaccatgaagacagaaagaaagaactacaccgccgagaaccacgagctggaagctctggccaaggccctggatacacagaaggaactggcagagagagccttctacatccaccgggaagctaccagaaatagccagcatctgcatgatcctgagatcgcccagtacctggaagaagagttcatcgaggaccacgccgaaaagatccggaccctggctggacacacctctgacctgaagaagttcatcacagccaacaatggccacgacctgagccttgccctgtacgtgtttgacgagtacctgcaaaaaacagtgtaatga

SEQ ID NO: 215 - DNA, 1281 bp, Artificial Sequence
  Description of Artificial Sequence: Synthetic polynucleotide
atgggctggagctgcatcatcctgtttctggtggccacagccacaggcgtgcacgccagcgcctggtcccaccctcaatttgagaaactggaagtgctgtttcagggccctggctctgtggaatgcgacttcagcccactgctcagtggaacacccccccaggtgtacaatttcaagcggctggtgttcaccaactgcaactacaacctgacaaagctgctgagcctgttcagcgtcaatgatttcacctgttcacagatcagccccgccgctatcgcctctaactgctacagctctctgatcctggactacttctcttaccctctgagcatgaaaagcgacctgtctgtttctagcgccggacctatcagccaatttaactacaagcagagcttcagcaaccccacatgcctgatcctggctaccgtgccccacaacctgaccaccatcaccaagcccctgaagtactcttatatcaacaagtgcagcagactgctgtctgatgatagaaccgaggtgcctcagctggtgaacgccaatcagtactccccttgtgtgtcgatcgtgcctagcaccgtgtgggaagatggcgactactaccggaagcagctgtcccctctggaaggaggaggctggctggttgctagcggaagcaccgtggctatgaccgagcagcttcagatgggcttcggcattaccgtccagtacggcacagacaccaatagcgtgtgtcctaaactggagggcggatccgagaaggccgcaaaagccgaggaagccgccagagatatcattaagctgctgaacgagcaagtgaacaaggagatgaacagcagcaacctgtacatgagcatgtccagctggtgctacacccacagcctggacggcgccggcctgttcctgttcgaccacgccgctgaagaatacgagcacgccaagaaactgatcatcttcctgaatgaaaacaacgtgccagtgcagctgacatctatctctgcccctgagcataagttcgagggcctgacacaaatcttccagaaggcctacgagcacgagcagcacatctccgagagcattaacaacatcgtggaccacgccatcaagtcaaaggaccatgctaccttcaacttcctgcagtggtacgtggccgagcagcacgaggaagaggtcctgtttaaggacatcctggataagatcgagctgatcggcaacgagaaccacggcctgtacctcgccgaccagtatgtgaagggcatcgccaagtccagaaagagctaatga

SEQ ID NO: 216 - DNA, 1314 bp, Artificial Sequence
  Description of Artificial Sequence: Synthetic polynucleotide
atggacagcaagggctcttctcagaagggaagtagactgctgctgctcctcgttgtgtccaacctgctgctgcctcagggggtgctggctagcgcctggtcccaccctcaatttgagaaactggaagtgctgtttcagggccctggctctgtggaatgcgacttcagcccactgctcagtggaacacccccccaggtgtacaatttcaagcggctggtgttcaccaactgcaactacaacctgacaaagctgctgagcctgttcagcgtcaatgatttcacctgttcacagatcagccccgccgctatcgcctctaactgctacagctctctgatcctggactacttctcttaccctctgagcatgaaaagcgacctgtctgtttctagcgccggacctatcagccaatttaactacaagcagagcttcagcaaccccacatgcctgatcctggctaccgtgccccacaacctgaccaccatcaccaagcccctgaagtactcttatatcaacaagtgcagcagactgctgtctgatgatagaaccgaggtgcctcagctggtgaacgccaatcagtactccccttgtgtgtcgatcgtgcctagcaccgtgtgggaagatggcgactactaccggaagcagctgtcccctctggaaggaggaggctggctggttgctagcggaagcaccgtggctatgaccgagcagcttcagatgggcttcggcattaccgtccagtacggcacagacaccaatagcgtgtgtcctaaactggagggcggatccgagaaggccgcaaaagccgaggaagccgccagagatatcattaagctgctgaacgagcaagtgaacaaggagatgaacagcagcaacctgtacatgagcatgtccagctggtgctacacccacagcctggacggcgccggcctgttcctgttcgaccacgccgctgaagaatacgagcacgccaagaaactgatcatcttcctgaatgaaaacaacgtgccagtgcagctgacatctatctctgcccctgagcataagttcgagggcctgacacaaatcttccagaaggcctacgagcacgagcagcacatctccgagagcattaacaacatcgtggaccacgccatcaagtcaaaggaccatgctaccttcaacttcctgcagtggtacgtggccgagcagcacgaggaagaggtcctgtttaaggacatcctggataagatcgagctgatcggcaacgagaaccacggcctgtacctcgccgaccagtatgtgaagggcatcgccaagtccagaaagagctaatga

SEQ ID NO: 217 - protein, 411 aa, Artificial Sequence
  Description of Artificial Sequence: Synthetic polypeptide
MGWSCIILFLVATATGVHASAWSHPQFEKLEVLFQGPGSTNLCPFGEVFNATRFASVYAWNRKRISNCVADYSVLYNSASFSTFKCYGVSPTKLNDLCFTNVYADSFVIRGDEVRQIAPGQTGKIADYNYKLPDDFTGCVIAWNSNNLDSKVGGNYNYLYRLFRKSNLKPFERDISTEIYQAGSTPCNGVEGFNCYFPLQSYGFQPTNGVGYQPYRVVVLSFELLHAPATVCGPGGSEKAAKAEEAARDIIKLLNEQVNKEMNSSNLYMSMSSWCYTHSLDGAGLFLFDHAAEEYEHAKKLIIFLNENNVPVQLTSISAPEHKFEGLTQIFQKAYEHEQHISESINNIVDHAIKSKDHATFNFLQWYVAEQHEEEVLFKDILDKIELIGNENHGLYLADQYVKGIAKSRKS

SEQ ID NO: 218 - protein, 410 aa, Artificial Sequence
  Description of Artificial Sequence: Synthetic polypeptide
MGWSCIILFLVATATGVHASAWSHPQFEKLEVLFQGPGSTNLCPFGEVFNATKFPSVYAWERKRISNCVADYSVLYNSTFFSTFKCYGVSATKLNDLCFSNVYADSFVVKGDDVRQIAPGQTGVIADYNYKLPDDFMGCVLAWNTRNIDATSTGNYNYKYRYLRHGKLRPFERDISNVPFSPDGKPCTPPALNCYWPLNDYGFYTTTGIGYQPYRVVVLSFELLNAPATVCGPGGSEKAAKAEEAARDIIKLLNEQVNKEMNSSNLYMSMSSWCYTHSLDGAGLFLFDHAAEEYEHAKKLIIFLNENNVPVQLTSISAPEHKFEGLTQIFQKAYEHEQHISESINNIVDHAIKSKDHATFNFLQWYVAEQHEEEVLFKDILDKIELIGNENHGLYLADQYVKGIAKSRKS

SEQ ID NO: 219 - protein, 456 aa, Artificial Sequence
  Description of Artificial Sequence: Synthetic polypeptide
MGWSCIILFLVATATGVHASAWSHPQFEKLEVLFQGPGSEAKPSGSVVEQAEGVECDFSPLLSGTPPQVYNFKRLVFTNCNYNLTKLLSLFSVNDFTCSQISPAAIASNCYSSLILDYFSYPLSMKSDLSVSSAGPISQFNYKQSFSNPTCLILATVPHNLTTITKPLKYSYINKCSRLLSDDRTEVPQLVNANQYSPCVSIVPSTVWEDGDYYRKQLSPLEGGGWLVASGSTVAMTEQLQMGFGITVQYGTDTNSVCPKLEFANDTKIASQLGNCVEYGGSEKAAKAEEAARDIIKLLNEQVNKEMNSSNLYMSMSSWCYTHSLDGAGLFLFDHAAEEYEHAKKLIIFLNENNVPVQLTSISAPEHKFEGLTQIFQKAYEHEQHISESINNIVDHAIKSKDHATFNFLQWYVAEQHEEEVLFKDILDKIELIGNENHGLYLADQYVKGIAKSRKS

SEQ ID NO: 220 - protein, 422 aa, Artificial Sequence
  Description of Artificial Sequence: Synthetic polypeptide
MDSKGSSQKGSRLLLLLVVSNLLLPQGVLASAWSHPQFEKLEVLFQGPGSTNLCPFGEVFNATRFASVYAWNRKRISNCVADYSVLYNSASFSTFKCYGVSPTKLNDLCFTNVYADSFVIRGDEVRQIAPGQTGKIADYNYKLPDDFTGCVIAWNSNNLDSKVGGNYNYLYRLFRKSNLKPFERDISTEIYQAGSTPCNGVEGFNCYFPLQSYGFQPTNGVGYQPYRVVVLSFELLHAPATVCGPGGSEKAAKAEEAARDIIKLLNEQVNKEMNSSNLYMSMSSWCYTHSLDGAGLFLFDHAAEEYEHAKKLIIFLNENNVPVQLTSISAPEHKFEGLTQIFQKAYEHEQHISESINNIVDHAIKSKDHATFNFLQWYVAEQHEEEVLFKDILDKIELIGNENHGLYLADQYVKGIAKSRKS

SEQ ID NO: 221 - protein, 421 aa, Artificial Sequence
  Description of Artificial Sequence: Synthetic polypeptide
MDSKGSSQKGSRLLLLLVVSNLLLPQGVLASAWSHPQFEKLEVLFQGPGSTNLCPFGEVFNATKFPSVYAWERKRISNCVADYSVLYNSTFFSTFKCYGVSATKLNDLCFSNVYADSFVVKGDDVRQIAPGQTGVIADYNYKLPDDFMGCVLAWNTRNIDATSTGNYNYKYRYLRHGKLRPFERDISNVPFSPDGKPCTPPALNCYWPLNDYGFYTTTGIGYQPYRVVVLSFELLNAPATVCGPGGSEKAAKAEEAARDIIKLLNEQVNKEMNSSNLYMSMSSWCYTHSLDGAGLFLFDHAAEEYEHAKKLIIFLNENNVPVQLTSISAPEHKFEGLTQIFQKAYEHEQHISESINNIVDHAIKSKDHATFNFLQWYVAEQHEEEVLFKDILDKIELIGNENHGLYLADQYVKGIAKSRKS

SEQ ID NO: 222 - protein, 467 aa, Artificial Sequence
  Description of Artificial Sequence: Synthetic polypeptide
MDSKGSSQKGSRLLLLLVVSNLLLPQGVLASAWSHPQFEKLEVLFQGPGSEAKPSGSVVEQAEGVECDFSPLLSGTPPQVYNFKRLVFTNCNYNLTKLLSLFSVNDFTCSQISPAAIASNCYSSLILDYFSYPLSMKSDLSVSSAGPISQFNYKQSFSNPTCLILATVPHNLTTITKPLKYSYINKCSRLLSDDRTEVPQLVNANQYSPCVSIVPSTVWEDGDYYRKQLSPLEGGGWLVASGSTVAMTEQLQMGFGITVQYGTDTNSVCPKLEFANDTKIASQLGNCVEYGGSEKAAKAEEAARDIIKLLNEQVNKEMNSSNLYMSMSSWCYTHSLDGAGLFLFDHAAEEYEHAKKLIIFLNENNVPVQLTSISAPEHKFEGLTQIFQKAYEHEQHISESINNIVDHAIKSKDHATFNFLQWYVAEQHEEEVLFKDILDKIELIGNENHGLYLADQYVKGIAKSRKS

SEQ ID NO: 223 - protein, 442 aa, Artificial Sequence
  Description of Artificial Sequence: Synthetic polypeptide
MGWSCIILFLVATATGVHASAWSHPQFEKLEVLFQGPGSVECDFSPLLSGTPPQVYNFKRLVFTNCNYNLTKLLSLFSVNDFTCSQISPAAIASNCYSSLILDYFSYPLSMKSDLSVSSAGPISQFNYKQSFSNPTCLILATVPHNLTTITKPLKYSYINKCSRLLSDDRTEVPQLVNANQYSPCVSIVPSTVWEDGDYYRKQLSPLEGGGWLVASGSTVAMTEQLQMGFGITVQYGTDTNSVCPKLEGGSTQCNVNPVQIPKDWITMHRSCRNSMRQQIQMEVGASLQYLAMGAHFSKDVVNRPGFAQLFFDAASEEREHAMKLIEYLLMRGELTNDVSSLLQVRPPTRSSWKGGVEALEHALSMESDVTKSIRNVIKACEDDSEFNDYHLVDYLTGDFLEEQYKGQRDLAGKASTLKKLMDRHEALGEFIFDKKLLGIDV

SEQ ID NO: 224 - protein, 443 aa, Artificial Sequence
  Description of Artificial Sequence: Synthetic polypeptide
MGWSCIILFLVATATGVHAVECDFSPLLSGTPPQVYNFKRLVFTNCNYNLTKLLSLFSVNDFTCSQISPAAIASNCYSSLILDYFSYPLSMKSDLSVSSAGPISQFNYKQSFSNPTCLILATVPHNLTTITKPLKYSYINKCSRLLSDDRTEVPQLVNANQYSPCVSIVPSTVWEDGDYYRKQLSPLEGGGWLVASGSTVAMTEQLQMGFGITVQYGTDTNSVCPKLEGGSADTCYNDVALDCGITSNSLALPRCNAVYGEYGSHGNVATELQAYAKLHLERSYDYLLSAAYFNNYQTNRAGFSKLFKKLSDEAWSKTIDIIKHVTKRGDKMNFDQHSTMKTERKNYTAENHELEALAKALDTQKELAERAFYIHREATRNSQHLHDPEIAQYLEEEFIEDHAEKIRTLAGHTSDLKKFITANNGHDLSLALYVFDEYLQKTV

SEQ ID NO: 225 - protein, 427 aa, Artificial Sequence
  Description of Artificial Sequence: Synthetic polypeptide
MGWSCIILFLVATATGVHASAWSHPQFEKLEVLFQGPGSTNLCPFGEVFNATKFPSVYAWERKRISNCVADYSVLYNSTFFSTFKCYGVSATKLNDLCFSNVYADSFVVKGDDVRQIAPGQTGVIADYNYKLPDDFMGCVLAWNTRNIDATSTGNYNYKYRYLRHGKLRPFERDISNVPFSPDGKPCTPPALNCYWPLNDYGFYTTTGIGYQPYRVVVLSFELLNAPATVCGPGGSTQCNVNPVQIPKDWITMHRSCRNSMRQQIQMEVGASLQYLAMGAHFSKDVVNRPGFAQLFFDAASEEREHAMKLIEYLLMRGELTNDVSSLLQVRPPTRSSWKGGVEALEHALSMESDVTKSIRNVIKACEDDSEFNDYHLVDYLTGDFLEEQYKGQRDLAGKASTLKKLMDRHEALGEFIFDKKLLGIDV

SEQ ID NO: 226 - protein, 448 aa, Artificial Sequence
  Description of Artificial Sequence: Synthetic polypeptide
MGWSCIILFLVATATGVHASAWSHPQFEKLEVLFQGPGSTNLCPFGEVFNATKFPSVYAWERKRISNCVADYSVLYNSTFFSTFKCYGVSATKLNDLCFSNVYADSFVVKGDDVRQIAPGQTGVIADYNYKLPDDFMGCVLAWNTRNIDATSTGNYNYKYRYLRHGKLRPFERDISNVPFSPDGKPCTPPALNCYWPLNDYGFYTTTGIGYQPYRVVVLSFELLNAPATVCGPGGSADTCYNDVALDCGITSNSLALPRCNAVYGEYGSHGNVATELQAYAKLHLERSYDYLLSAAYFNNYQTNRAGFSKLFKKLSDEAWSKTIDIIKHVTKRGDKMNFDQHSTMKTERKNYTAENHELEALAKALDTQKELAERAFYIHREATRNSQHLHDPEIAQYLEEEFIEDHAEKIRTLAGHTSDLKKFITANNGHDLSLALYVFDEYLQKTV

SEQ ID NO: 227 - protein, 425 aa, Artificial Sequence
  Description of Artificial Sequence: Synthetic polypeptide
MGWSCIILFLVATATGVHASAWSHPQFEKLEVLFQGPGSVECDFSPLLSGTPPQVYNFKRLVFTNCNYNLTKLLSLFSVNDFTCSQISPAAIASNCYSSLILDYFSYPLSMKSDLSVSSAGPISQFNYKQSFSNPTCLILATVPHNLTTITKPLKYSYINKCSRLLSDDRTEVPQLVNANQYSPCVSIVPSTVWEDGDYYRKQLSPLEGGGWLVASGSTVAMTEQLQMGFGITVQYGTDTNSVCPKLEGGSEKAAKAEEAARDIIKLLNEQVNKEMNSSNLYMSMSSWCYTHSLDGAGLFLFDHAAEEYEHAKKLIIFLNENNVPVQLTSISAPEHKFEGLTQIFQKAYEHEQHISESINNIVDHAIKSKDHATFNFLQWYVAEQHEEEVLFKDILDKIELIGNENHGLYLADQYVKGIAKSRKS

SEQ ID NO: 228 - protein, 436 aa, Artificial Sequence
  Description of Artificial Sequence: Synthetic polypeptide
MDSKGSSQKGSRLLLLLVVSNLLLPQGVLASAWSHPQFEKLEVLFQGPGSVECDFSPLLSGTPPQVYNFKRLVFTNCNYNLTKLLSLFSVNDFTCSQISPAAIASNCYSSLILDYFSYPLSMKSDLSVSSAGPISQFNYKQSFSNPTCLILATVPHNLTTITKPLKYSYINKCSRLLSDDRTEVPQLVNANQYSPCVSIVPSTVWEDGDYYRKQLSPLEGGGWLVASGSTVAMTEQLQMGFGITVQYGTDTNSVCPKLEGGSEKAAKAEEAARDIIKLLNEQVNKEMNSSNLYMSMSSWCYTHSLDGAGLFLFDHAAEEYEHAKKLIIFLNENNVPVQLTSISAPEHKFEGLTQIFQKAYEHEQHISESINNIVDHAIKSKDHATFNFLQWYVAEQHEEEVLFKDILDKIELIGNENHGLYLADQYVKGIAKSRKS

SEQ ID NO: 229 - protein, 163 aa, Helicobacter pylori
DIIKLLNEQVNKEMNSSNLYMSMSSWCYTHSLDGAGLFLFDHAAEEYEHAKKLIIFLNENNVPVQLTSISAPEHKFEGLTQIFQKAYEHEQHISESINNIVDHAIKSKDHATFNFLQWYVAEQHEEEVLFKDILDKIELIGNENHGLYLADQYVKGIAKSRKS

SEQ ID NO: 230 - protein, 212 aa, Trichoplusia ni
ADTCYNDVALDCGITSNSLALPRCNAVYGEYGSHGNVATELQAYAKLHLERSYDYLLSAAYFNNYQTNRAGFSKLFKKLSDEAWSKTIDIIKHVTKRGDKMNFDQHSTMKTERKNYTAENHELEALAKALDTQKELAERAFYIHREATRNSQHLHDPEIAQYLEEEFIEDHAEKIRTLAGHTSDLKKFITANNGHDLSLALYVFDEYLQKTV

SEQ ID NO: 231 - protein, 191 aa, Trichoplusia ni
TQCNVNPVQIPKDWITMHRSCRNSMRQQIQMEVGASLQYLAMGAHFSKDVVNRPGFAQLFFDAASEEREHAMKLIEYLLMRGELTNDVSSLLQVRPPTRSSWKGGVEALEHALSMESDVTKSIRNVIKACEDDSEFNDYHLVDYLTGDFLEEQYKGQRDLAGKASTLKKLMDRHEALGEFIFDKKLLGIDV

SEQ ID NO: 232 - protein, 383 aa, Artificial Sequence
  Description of Artificial Sequence: Synthetic polypeptide
TNLCPFGEVFNATRFASVYAWNRKRISNCVADYSVLYNSASFSTFKCYGVSPTKLNDLCFTNVYADSFVIRGDEVRQIAPGQTGKIADYNYKLPDDFTGCVIAWNSNNLDSKVGGNYNYLYRLFRKSNLKPFERDISTEIYQAGSTPCNGVEGFNCYFPLQSYGFQPTNGVGYQPYRVVVLSFELLHAPATVCGPGSGGSGGSGGSGGSEKAAKAEEAARDIIKLLNEQVNKEMNSSNLYMSMSSWCYTHSLDGAGLFLFDHAAEEYEHAKKLIIFLNENNVPVQLTSISAPEHKFEGLTQIFQKAYEHEQHISESINNIVDHAIKSKDHATFNFLQWYVAEQHEEEVLFKDILDKIELIGNENHGLYLADQYVKGIAKSRKS

SEQ ID NO: 233 - DNA, 795 bp, Artificial Sequence
  Description of Artificial Sequence: Synthetic polynucleotide
atgggctggagctgcatcattctgtttctggtggccacagccacaggagtgcacgccacaaacctgtgtcctttcggcgaggtgttcaatgccaccagattcgccagcgtgtacgcttgtaaccgcaagagaatctccaactgcgtagctgactacagcgtcctgtataacagcgcctctttttctaccttcaagtgctacggcgttagccctacaaagctgaacgacctgtgcttcacaaacgtgtacgccgatagctgcgtgattagaggcgacgaggtgcggcagatcgcccccggccagaccggcaagatcgccgactacaactataagctgcccgacgacttcaccggctgtgtgatcgcctggaacagcaacaacctggacagcaaggtgggaggcaactataactacctttaccggctgttcagaaagagcaatctgaaacctttcgagagagatatcagcaccgaaatctaccaggccggctctaccccttgtaacggcgtggaaggcttcaactgctacttcccactgcagagctacggctttcagcctaccaatggcgtgggctaccaaccttacagagtggtggtcctgagctttgagctgctgcacgccccagccaccgtgtgtggccctggctctggcctgcctgagaccggcggactggaagtgcttttccagggccctggatctgcctggtcccacccccagttcgaaaaaggcggaggcagcggcggcggaggcagcggcggcagcgcctggagccatcctcagttcgagaagtaatag

SEQ ID NO: 234 - DNA, 795 bp, Artificial Sequence
  Description of Artificial Sequence: Synthetic polynucleotide
atgggctggagctgcatcattctgtttctggtggccacagccacaggagtgcacgccacaaacctgtgtcctttcggcgaggtgttcaatgccaccagattcgccagcgtgtacgcttggaaccgcaagagatgctccaactgcgtagctgactacagcgtcctgtataacagcgcctctttttctaccttcaagtgctacggcgttagccctacaaagctgaacgacctgtgcttcacaaactgctacgccgatagcttcgtgattagaggcgacgaggtgcggcagatcgcccccggccagaccggcaagatcgccgactacaactataagctgcccgacgacttcaccggctgtgtgatcgcctggaacagcaacaacctggacagcaaggtgggaggcaactataactacctttaccggctgttcagaaagagcaatctgaaacctttcgagagagatatcagcaccgaaatctaccaggccggctctaccccttgtaacggcgtggaaggcttcaactgctacttcccactgcagagctacggctttcagcctaccaatggcgtgggctaccaaccttacagagtggtggtcctgagctttgagctgctgcacgccccagccaccgtgtgtggccctggctctggcctgcctgagaccggcggactggaagtgcttttccagggccctggatctgcctggtcccacccccagttcgaaaaaggcggaggcagcggcggcggaggcagcggcggcagcgcctggagccatcctcagttcgagaagtaatag

SEQ ID NO: 235 - DNA, 795 bp, Artificial Sequence
  Description of Artificial Sequence: Synthetic polynucleotide
atgggctggagctgcatcattctgtttctggtggccacagccacaggagtgcacgccacaaacctgtgtcctttcggcgaggtgttcaatgccaccagattcgccagcgtgtacgcttggaaccgcaagagaatctccaactgcgtagctgactacagcgtcctgtataacagcgcctctttttctaccttcaagtgctacggcgttagccctacaaagctgaacgacctgtgcttcacaaacgtgtacgccgatagcttcgtgattagaggcgacgaggtgcggcagatcgcccccggccagaccggcaagatcgccgactacaactataagctgcccgacgacttcaccggctgtgtgatctgctggaacagcaacaacctggacagcaaggtgggaggcaactataactacctttaccggctgttcagaaagagcaatctgaaacctttcgagagagatatcagcaccgaaatctaccaggccggctctaccccttgtaacggcgtggaaggcttcaactgctacttcccactgcagagctacggctttcagcctaccaatggcgtgggctaccaaccttacagatgcgtggtcctgagctttgagctgctgcacgccccagccaccgtgtgtggccctggctctggcctgcctgagaccggcggactggaagtgcttttccagggccctggatctgcctggtcccacccccagttcgaaaaaggcggaggcagcggcggcggaggcagcggcggcagcgcctggagccatcctcagttcgagaagtaatag

SEQ ID NO: 236 - DNA, 795 bp, Artificial Sequence
  Description of Artificial Sequence: Synthetic polynucleotide
atgggctggagctgcatcattctgtttctggtggccacagccacaggagtgcacgccacaaacctgtgtcctttcggcgaggtgttcaatgccaccagattcgccagcgtgtacgcttggaaccgcaagagaatctccaactgcgtagctgactacagcgtcctgtataacagcgcctctttttctaccttcaagtgctacggcgttagccctacaaagctgaacgacctgtgcttcacaaacgtgtacgccgatagcttcgtgattagaggcgacgaggtgcggcagatcgcctgcggccagaccggcaagatcgccgactacaactataagctgcccgacgactgcaccggctgtgtgatcgcctggaacagcaacaacctggacagcaaggtgggaggcaactataactacctttaccggctgttcagaaagagcaatctgaaacctttcgagagagatatcagcaccgaaatctaccaggccggctctaccccttgtaacggcgtggaaggcttcaactgctacttcccactgcagagctacggctttcagcctaccaatggcgtgggctaccaaccttacagagtggtggtcctgagctttgagctgctgcacgccccagccaccgtgtgtggccctggctctggcctgcctgagaccggcggactggaagtgcttttccagggccctggatctgcctggtcccacccccagttcgaaaaaggcggaggcagcggcggcggaggcagcggcggcagcgcctggagccatcctcagttcgagaagtaatag

SEQ ID NO: 237 - DNA, 795 bp, Artificial Sequence
  Description of Artificial Sequence: Synthetic polynucleotide
atgggctggagctgcatcattctgtttctggtggccacagccacaggagtgcacgccacaaacctgtgtcctttcggcgaggtgttcaatgccaccagattcgccagcgtgtacgcttggaaccgcaagagaatctccaactgcgtagctgactacagcgtcctgtataacagcgcctctttttctaccttcaagtgctacggcgttagccctacaaagctgaacgacctgtgcttcacaaacgtgtacgccgatagcttcgtgattagaggctgcgaggtgcggcagatcgcccccggccagaccggcaagatcgccgactacaactataagctgcccgacgacttcaccggctgtgtgatcgcctggaacagcaacaacctggacagcaaggtgggaggcaactataactacctttaccggctgttcagaaagagcaatctgaaacctttcgagagagatatcagcaccgaaatctaccaggccggctctaccccttgtaacggcgtggaaggcttcaactgctacttcccactgcagagctacggctttcagcctaccaatggcgtgtgctaccaaccttacagagtggtggtcctgagctttgagctgctgcacgccccagccaccgtgtgtggccctggctctggcctgcctgagaccggcggactggaagtgcttttccagggccctggatctgcctggtcccacccccagttcgaaaaaggcggaggcagcggcggcggaggcagcggcggcagcgcctggagccatcctcagttcgagaagtaatag

SEQ ID NO: 238 - DNA, 795 bp, Artificial Sequence
  Description of Artificial Sequence: Synthetic polynucleotide
atgggctggagctgcatcattctgtttctggtggccacagccacaggagtgcacgccacaaacctgtgtcctttcggcgaggtgttcaatgccaccagattcgccagcgtgtacgcttggaaccgcaagagaatctccaactgcgtagctgactacagcgtcctgtataacagcgcctctttttctaccttcaagtgctacggcgttagccctacaaagctgaacgacctgtgcttcacaaacgtgtacgccgatagcttcgtgattagaggcgacgaggtgcggcagatcgcccccggccagaccggcaagatcgccgactacaactataagctgcccgacgacttcaccggctgtgtgatcgcctggaactgcaacaacctgtgcagcaaggtgggaggcaactataactacctttaccggctgttcagaaagagcaatctgaaacctttcgagagagatatcagcaccgaaatctaccaggccggctctaccccttgtaacggcgtggaaggcttcaactgctacttcccactgcagagctacggctttcagcctaccaatggcgtgggctaccaaccttacagagtggtggtcctgagctttgagctgctgcacgccccagccaccgtgtgtggccctggctctggcctgcctgagaccggcggactggaagtgcttttccagggccctggatctgcctggtcccacccccagttcgaaaaaggcggaggcagcggcggcggaggcagcggcggcagcgcctggagccatcctcagttcgagaagtaatag

SEQ ID NO: 239 - DNA, 795 bp, Artificial Sequence
  Description of Artificial Sequence: Synthetic polynucleotide
atgggctggagctgcatcattctgtttctggtggccacagccacaggagtgcacgccacaaacctgtgtcctttcggcgaggtgttcaatgccaccagattcgccagcgtgtacgcttggaaccgcaagagaatctccaactgcgtagctgactacagcgtcctgtataacagcgcctctttttctaccttcaagtgctacggcgttagccctacaaagctgaacgacctgtgcttcacaaacgtgtacgccgatagcttcgtgattagaggcgacgaggtgcggcagatcgcccccggccagaccggcaagatcgccgactacaactataagctgcccgacgacttcaccggctgtgtgatcgcctggaacagcaacaacctggacagcaaggtgggaggcaactataactacctttaccggctgttcagaaagagcaatctgaaacctttcgagagagatatcagcaccgaaatctaccaggccggctctaccccttgtaacggcgtggaaggcttcaactgctacttcccactgcagagctacggctttcagcctacctgtggcgtgggctgccaaccttacagagtggtggtcctgagctttgagctgctgcacgccccagccaccgtgtgtggccctggctctggcctgcctgagaccggcggactggaagtgcttttccagggccctggatctgcctggtcccacccccagttcgaaaaaggcggaggcagcggcggcggaggcagcggcggcagcgcctggagccatcctcagttcgagaagtaatag

SEQ ID NO: 240 - DNA, 795 bp, Artificial Sequence
  Description of Artificial Sequence: Synthetic polynucleotide
atgggctggagctgcatcattctgtttctggtggccacagccacaggagtgcacgccacaaacctgtgtcctttcggcgaggtgttcaatgccaccagattcgccagcgtgtacgcttggaaccgcaagagaatctccaactgcgtagctgactacagcgtcctgtataacagcgcctctttttctaccttcaagtgctacggcgttagccctacaaagctgaacgacctgtgcttcacaaacgtgtacgccgatagcttcgtgattagaggcgacgaggtgcggcagatcgcccccggccagaccggcaagatcgccgactacaactataagctgcccgacgacttcaccggctgtgtgatcgcctggaacagcaacaacctggacagcaaggtgggatgcaactataactacctttaccggctgttcagaaagagcaatctgaaacctttcgagagagatatcagcaccgaaatctaccaggccggctctaccccttgtaacggcgtggaaggcttcaactgctacttcccactgcagagctactgctttcagcctaccaatggcgtgggctaccaaccttacagagtggtggtcctgagctttgagctgctgcacgccccagccaccgtgtgtggccctggctctggcctgcctgagaccggcggactggaagtgcttttccagggccctggatctgcctggtcccacccccagttcgaaaaaggcggaggcagcggcggcggaggcagcggcggcagcgcctggagccatcctcagttcgagaagtaatag

SEQ ID NO: 241 - DNA, 795 bp, Artificial Sequence
  Description of Artificial Sequence: Synthetic polynucleotide
atgggctggagctgcatcattctgtttctggtggccacagccacaggagtgcacgccacaaacctgtgtcctttcggcgaggtgttcaatgccaccagattcgccagcgtgtacgcttggaaccgcaagagaatctccaactgcgtagctgactgcagcgtcctgtataacagcgcctctttttctaccttcaagtgctacggcgttagccctacaaagtgcaacgacctgtgcttcacaaacgtgtacgccgatagcttcgtgattagaggcgacgaggtgcggcagatcgcccccggccagaccggcaagatcgccgactacaactataagctgcccgacgacttcaccggctgtgtgatcgcctggaacagcaacaacctggacagcaaggtgggaggcaactataactacctttaccggctgttcagaaagagcaatctgaaacctttcgagagagatatcagcaccgaaatctaccaggccggctctaccccttgtaacggcgtggaaggcttcaactgctacttcccactgcagagctacggctttcagcctaccaatggcgtgggctaccaaccttacagagtggtggtcctgagctttgagctgctgcacgccccagccaccgtgtgtggccctggctctggcctgcctgagaccggcggactggaagtgcttttccagggccctggatctgcctggtcccacccccagttcgaaaaaggcggaggcagcggcggcggaggcagcggcggcagcgcctggagccatcctcagttcgagaagtaatag

SEQ ID NO: 242 - DNA, 795 bp, Artificial Sequence
  Description of Artificial Sequence: Synthetic polynucleotide
atgggctggagctgcatcattctgtttctggtggccacagccacaggagtgcacgccacaaacctgtgtcctttcggcgaggtgttcaatgccaccagattcgccagcgtgtacgcttggaaccgcaagagaatctccaactgcgtagctgactacagcgtcctgtataacagcgcctctttttctaccttcaagtgctacggcgttagccctacaaagctgaacgacctgtgcttcacaaacgtgtacgccgatagcttcgtgattagaggcgacgaggtgcggcagatcgcccccggccagaccggcaagatcgccgactacaactataagctgcccgacgacttcaccggctgtgtgatcgcctggaacagcaacaacctggacagcaaggtgggaggcaactataactacctttaccggctgttcagaaagagcaatctgaaacctttcgagagagatatcagcaccgaaatctaccaggccggctctaccccttgtaacggcgtggaaggcttcaactgctacttcccactgcagagctacggctgtcagcctaccaatggcgtgggctaccaatgttacagagtggtggtcctgagctttgagctgctgcacgccccagccaccgtgtgtggccctggctctggcctgcctgagaccggcggactggaagtgcttttccagggccctggatctgcctggtcccacccccagttcgaaaaaggcggaggcagcggcggcggaggcagcggcggcagcgcctggagccatcctcagttcgagaagtaatag

SEQ ID NO: 243 - DNA, 795 bp, Artificial Sequence
  Description of Artificial Sequence: Synthetic polynucleotide
atgggctggagctgcatcattctgtttctggtggccacagccacaggagtgcacgccacaaacctgtgtcctttcggcgaggtgttcaatgccaccagattcgccagcgtgtacgcttggaaccgcaagagaatctccaactgcgtagctgactacagcgtcctgtataacagcgcctctttttctaccttcaagtgctacggcgttagccctacaaagctgaacgacctgtgcttcacaaacgtgtacgccgatagcttcgtgattagaggcgacgaggtgcggtgcatcgcccccggccagaccggcaagatctgcgactacaactataagctgcccgacgacttcaccggctgtgtgatcgcctggaacagcaacaacctggacagcaaggtgggaggcaactataactacctttaccggctgttcagaaagagcaatctgaaacctttcgagagagatatcagcaccgaaatctaccaggccggctctaccccttgtaacggcgtggaaggcttcaactgctacttcccactgcagagctacggctttcagcctaccaatggcgtgggctaccaaccttacagagtggtggtcctgagctttgagctgctgcacgccccagccaccgtgtgtggccctggctctggcctgcctgagaccggcggactggaagtgcttttccagggccctggatctgcctggtcccacccccagttcgaaaaaggcggaggcagcggcggcggaggcagcggcggcagcgcctggagccatcctcagttcgagaagtaatag

SEQ ID NO: 244 - protein, 263 aa, Artificial Sequence
  Description of Artificial Sequence: Synthetic polypeptide
MGWSCIILFLVATATGVHATNLCPFGEVFNATRFASVYACNRKRISNCVADYSVLYNSASFSTFKCYGVSPTKLNDLCFTNVYADSCVIRGDEVRQIAPGQTGKIADYNYKLPDDFTGCVIAWNSNNLDSKVGGNYNYLYRLFRKSNLKPFERDISTEIYQAGSTPCNGVEGFNCYFPLQSYGFQPTNGVGYQPYRVVVLSFELLHAPATVCGPGSGLPETGGLEVLFQGPGSAWSHPQFEKGGGSGGGGSGGSAWSHPQFEK

SEQ ID NO: 245 - protein, 263 aa, Artificial Sequence
  Description of Artificial Sequence: Synthetic polypeptide
MGWSCIILFLVATATGVHATNLCPFGEVFNATRFASVYAWNRKRCSNCVADYSVLYNSASFSTFKCYGVSPTKLNDLCFTNCYADSFVIRGDEVRQIAPGQTGKIADYNYKLPDDFTGCVIAWNSNNLDSKVGGNYNYLYRLFRKSNLKPFERDISTEIYQAGSTPCNGVEGFNCYFPLQSYGFQPTNGVGYQPYRVVVLSFELLHAPATVCGPGSGLPETGGLEVLFQGPGSAWSHPQFEKGGGSGGGGSGGSAWSHPQFEK

SEQ ID NO: 246 - protein, 263 aa, Artificial Sequence
  Description of Artificial Sequence: Synthetic polypeptide
MGWSCIILFLVATATGVHATNLCPFGEVFNATRFASVYAWNRKRISNCVADYSVLYNSASFSTFKCYGVSPTKLNDLCFTNVYADSFVIRGDEVRQIAPGQTGKIADYNYKLPDDFTGCVICWNSNNLDSKVGGNYNYLYRLFRKSNLKPFERDISTEIYQAGSTPCNGVEGFNCYFPLQSYGFQPTNGVGYQPYRCVVLSFELLHAPATVCGPGSGLPETGGLEVLFQGPGSAWSHPQFEKGGGSGGGGSGGSAWSHPQFEK

SEQ ID NO: 247 - protein, 263 aa, Artificial Sequence
  Description of Artificial Sequence: Synthetic polypeptide
MGWSCIILFLVATATGVHATNLCPFGEVFNATRFASVYAWNRKRISNCVADYSVLYNSASFSTFKCYGVSPTKLNDLCFTNVYADSFVIRGDEVRQIACGQTGKIADYNYKLPDDCTGCVIAWNSNNLDSKVGGNYNYLYRLFRKSNLKPFERDISTEIYQAGSTPCNGVEGFNCYFPLQSYGFQPTNGVGYQPYRVVVLSFELLHAPATVCGPGSGLPETGGLEVLFQGPGSAWSHPQFEKGGGSGGGGSGGSAWSHPQFEK

SEQ ID NO: 248 - protein, 263 aa, Artificial Sequence
  Description of Artificial Sequence: Synthetic polypeptide
MGWSCIILFLVATATGVHATNLCPFGEVFNATRFASVYAWNRKRISNCVADYSVLYNSASFSTFKCYGVSPTKLNDLCFTNVYADSFVIRGCEVRQIAPGQTGKIADYNYKLPDDFTGCVIAWNSNNLDSKVGGNYNYLYRLFRKSNLKPFERDISTEIYQAGSTPCNGVEGFNCYFPLQSYGFQPTNGVCYQPYRVVVLSFELLHAPATVCGPGSGLPETGGLEVLFQGPGSAWSHPQFEKGGGSGGGGSGGSAWSHPQFEK

SEQ ID NO: 249 - protein, 263 aa, Artificial Sequence
  Description of Artificial Sequence: Synthetic polypeptide
MGWSCIILFLVATATGVHATNLCPFGEVFNATRFASVYAWNRKRISNCVADYSVLYNSASFSTFKCYGVSPTKLNDLCFTNVYADSFVIRGDEVRQIAPGQTGKIADYNYKLPDDFTGCVIAWNCNNLCSKVGGNYNYLYRLFRKSNLKPFERDISTEIYQAGSTPCNGVEGFNCYFPLQSYGFQPTNGVGYQPYRVVVLSFELLHAPATVCGPGSGLPETGGLEVLFQGPGSAWSHPQFEKGGGSGGGGSGGSAWSHPQFEK

SEQ ID NO: 250 - protein, 263 aa, Artificial Sequence
  Description of Artificial Sequence: Synthetic polypeptide
MGWSCIILFLVATATGVHATNLCPFGEVFNATRFASVYAWNRKRISNCVADYSVLYNSASFSTFKCYGVSPTKLNDLCFTNVYADSFVIRGDEVRQIAPGQTGKIADYNYKLPDDFTGCVIAWNSNNLDSKVGGNYNYLYRLFRKSNLKPFERDISTEIYQAGSTPCNGVEGFNCYFPLQSYGFQPTCGVGCQPYRVVVLSFELLHAPATVCGPGSGLPETGGLEVLFQGPGSAWSHPQFEKGGGSGGGGSGGSAWSHPQFEK

SEQ ID NO: 251 - protein, 263 aa, Artificial Sequence
  Description of Artificial Sequence: Synthetic polypeptide
MGWSCIILFLVATATGVHATNLCPFGEVFNATRFASVYAWNRKRISNCVADYSVLYNSASFSTFKCYGVSPTKLNDLCFTNVYADSFVIRGDEVRQIAPGQTGKIADYNYKLPDDFTGCVIAWNSNNLDSKVGCNYNYLYRLFRKSNLKPFERDISTEIYQAGSTPCNGVEGFNCYFPLQSYCFQPTNGVGYQPYRVVVLSFELLHAPATVCGPGSGLPETGGLEVLFQGPGSAWSHPQFEKGGGSGGGGSGGSAWSHPQFEK

SEQ ID NO: 252 - protein, 263 aa, Artificial Sequence
  Description of Artificial Sequence: Synthetic polypeptide
MGWSCIILFLVATATGVHATNLCPFGEVFNATRFASVYAWNRKRISNCVADCSVLYNSASFSTFKCYGVSPTKCNDLCFTNVYADSFVIRGDEVRQIAPGQTGKIADYNYKLPDDFTGCVIAWNSNNLDSKVGGNYNYLYRLFRKSNLKPFERDISTEIYQAGSTPCNGVEGFNCYFPLQSYGFQPTNGVGYQPYRVVVLSFELLHAPATVCGPGSGLPETGGLEVLFQGPGSAWSHPQFEKGGGSGGGGSGGSAWSHPQFEK

SEQ ID NO: 253 - protein, 263 aa, Artificial Sequence
  Description of Artificial Sequence: Synthetic polypeptide
MGWSCIILFLVATATGVHATNLCPFGEVFNATRFASVYAWNRKRISNCVADYSVLYNSASFSTFKCYGVSPTKLNDLCFTNVYADSFVIRGDEVRQIAPGQTGKIADYNYKLPDDFTGCVIAWNSNNLDSKVGGNYNYLYRLFRKSNLKPFERDISTEIYQAGSTPCNGVEGFNCYFPLQSYGCQPTNGVGYQCYRVVVLSFELLHAPATVCGPGSGLPETGGLEVLFQGPGSAWSHPQFEKGGGSGGGGSGGSAWSHPQFEK
